(19) United States
(12) Patent Application Publication
(10) Pub. No.: US 2011/0150897 A1
(43) Pub. Date: Jun. 23, 2011

(54) INFLUENZA TARGETS

(76) Inventors: Thomas F. Meyer, Falkensee (DE); Alexander Karlas, Nurnberg (DE); Nikolaus Machuy, Bad Soden-Salmunster (DE); Jan David Manntz, Berlin (DE); Elke Muller, Aachen (DE); Thomas Rudel, Berlin (DE)

(21) Appl. No.: 12/445,228

(22) PCT Filed: Oct. 11, 2007
(86) PCT No.: PCT/EP07/08852

§ 371 Date: Feb. 4, 2011

Related U.S. Application Data
(60) Provisional application No. 60/850,651, filed on Oct. 11, 2006.

(51) Int. Cl. A61K 39/395; A61K 31/7088; A61K 38/02; A61K 31/711; A61K 31/7105; C12Q 1/70; G01N 33/53; C12Q 1/68; A61P 31/16; B82Y 5/00

(52) U.S. Cl. 424/158.1; 514/44 R; 514/3.7; 424/130.1; 514/44 A; 435/5; 435/7.1; 435/6.13; 977/773; 977/906

(57) ABSTRACT

The present invention relates to pharmaceutical compositions comprising modulators of kinases, kinase binding polypeptides or/and an inhibitor for influenza virus replication for the prevention or/and treatment of influenza.

[0001] The present invention relates to a pharmaceutical composition comprising an inhibitor of influenza virus replication. In particular, the present invention relates to a pharmaceutical composition comprising a modulator of a kinase or/and a kinase binding polypeptide for the prevention or/and treatment of influenza. Further, the present invention concerns a screening method for identification of a modulator of a kinase or/and a kinase binding polypeptide, which modulator is suitable for prevention or/and treatment of influenza. Yet another aspect is a screening method for identification of new targets for the prevention, alleviation or/and treatment of influenza.

[0002] In view of the threatening influenza pandemic, there is an acute need to develop and make available lastingly effective drugs. In Germany alone the annual occurrence of influenza causes between 5,000 and 20,000 deaths a year (source: Robert-Koch Institute). The recurring big influenza pandemics are especially feared. The first big pandemic, the so-called “Spanish Flu”, cost about 40 million lives in the years 1918-1919 including a high percentage of healthy, middle-aged people. A similar pandemic could be caused by the H5N1 influenza virus, which at the moment replicates mainly in birds, if acquired mutations enable the virus to be transmitted from person to person. The probability of a human pandemic has recently grown more acute with the spreading of bird flu (H5N1) worldwide and the infection of domestic animals. It is only a question of time until a highly pathogenic human influenza-recombinant emerges. The methods available at the moment for prophylaxis or therapy of an influenza infection, such as vaccination with viral surface proteins or the use of antiviral drugs (neuraminidase inhibitors or ion channel blockers), have various disadvantages. Already at this early stage resistance is appearing against one of our most effective preparations (Tamiflu), which may make it unsuitable to contain a pandemic. A central problem in the use of vaccines and drugs against influenza is the variability of the pathogen. Up to now the development of effective vaccines has required accurate prediction of the pathogen variant. Drugs directed against viral components can rapidly lose their effectiveness because of mutations of the pathogen.

[0003] An area of research which has received little attention up to now is the identification of critical target structures in the host cell. Viruses are dependent on certain cellular proteins to be able to replicate within the host. The knowledge of such cellular factors that are essential for viral replication but dispensable (at least temporarily) for humans could lead to the development of novel drugs. Rough estimates predict about 500 genes in the human genome which are essential for viral multiplication. Of these, 10% at least are probably dispensable temporarily or even permanently for the human organism. Inhibition of these genes and their products, which in contrast to the viral targets are constant in their structure, would enable the development of a new generation of antiviral drugs in the shortest time. Inhibition of such gene products could overcome the development of viral escape mutants that are not longer sensitive to antiviral drugs. Amongst other gene families kinases that are important regulatory proteins within the cell are often hijacked by viruses to manipulate the constitution of the host cell.

[0004] It is the object of the present invention to provide a screening method for genes involved in influenza virus replication. Another object is a screening method for identification of modulators of such genes.

[0005] In the context of the present invention, it was surprisingly found that inhibition of particular genes or the modulation of kinases or/and kinase binding polypeptides leads to reduction of influenza virus replication.

[0006] Table 1a, 1b and 4 describe targets for the prevention, alleviation or/and treatment of an influenza virus infection.

[0007] Examples of genes which upon downregulation increase the influenza virus replication are described in Table 1a. Thus, by increasing expression or/and activity of these genes or/and gene products, the influenza virus replication can be reduced.

[0008] Examples of genes which upon downregulation decrease the influenza virus replication are described in Table 1b and 4. Thus, by decreasing expression or/and activity of these genes or/and gene products, the influenza virus replication can be reduced.

[0009] Subject of the present invention is thus a screening method covering different aspects related to influenza virus infection, in particular influenza virus replication.

[0010] In a first aspect the screening method is a screening method for identification of a compound suitable for modulation of a kinase or/and a kinase binding polypeptide, comprising the steps
[0011] (a) providing a kinase or/and a kinase binding polypeptide,
[0012] (b) contacting a compound with the kinase or/and a kinase binding polypeptide of (a),
[0013] (c) determining the activity of the kinase or/and the kinase binding polypeptide,
[0014] (d) selecting a compound which modulates the activity of the kinase or/and the kinase binding polypeptide.

[0015] The screening method of the present invention may comprise a cellular screening assay or/and a molecular screening assay. A cellular screening assay includes the determination of the activity or/and expression of a kinase or/and of a kinase binding polypeptide in a cell or/and in a non human organism. A molecular screening assay includes determination of the activity of an isolated kinase or/and of an isolated kinase binding polypeptide.

[0016] The screening assay in the screening method of the present invention may be performed in vivo or/and in vitro.

[0017] In the screening method of the present invention the kinase or/and the kinase binding polypeptide may be provided in an isolated form. “Isolated” in the context of the present invention refers to any protein or polypeptide isolation procedure known by a person skilled in the art. “Isolated form” or “isolated kinase or/and isolated kinase binding polypeptide” includes essentially pure or crude preparations or formulations of the kinase or/and kinase binding polypeptide.

[0018] In the screening method of the present invention, the kinase or/and the kinase binding polypeptide may be provided by a cell or/and a non-human organism capable of expressing the kinase or/and the kinase binding polypeptide.

[0019] In yet another aspect the screening method is a screening method for identification of a kinase modulator suitable for prevention, alleviation or/and treatment of an influenza virus infection, comprising the steps
[0020] (I) providing a cell or/and a non-human organism capable of being infected with an influenza virus and capable of expressing a kinase or/and a kinase binding polypeptide,
[0021] (II) contacting the cell or/and the organism of (I) with an influenza virus and with a compound known to be capable of modulating the expression or/and activity of the kinase or/and kinase binding polypeptide,
[0022] (III) determining the amount of influenza virus produced by the cell or/and the organism, and
[0023] (IV) selecting a compound which reduces the amount of the influenza virus produced by the cell or/and the organism.

[0024] In a further aspect the screening method is a screening method for identification of compound suitable for the prevention, alleviation or/and treatment of an influenza virus infection, comprising the steps
[0025] (A) providing a cell or/and a non-human organism capable of being infected with an influenza virus and capable of expressing a gene, wherein the gene or/and gene product thereof is capable of modulating an influenza virus replication,
[0026] (B) contacting the cell or/and the organism of (A) with an influenza virus and with a compound known to be capable of modulating the expression or/and activity of the gene of (A) or/and the gene product thereof,
[0027] (C) determining the amount of influenza virus produced by the cell or/and the organism, and
[0028] (D) selecting a compound which reduces the amount of the influenza virus produced by the cell or/and the organism.

[0029] The gene of (A) is preferably selected from Table 1A, 1B and 4, in more preferred embodiments from one of the Tables 1A, 1B or 4. “Modulation” in (A) and (B) may be “activation” or “inhibition”, in particular “inhibition”.

[0030] In a further aspect, the screening method is a screening method for identification of a compound suitable for prevention, alleviation or/and treatment of an influenza virus infection, comprising the steps
[0031] (i) providing a cell or/and a non-human organism capable of expressing a kinase or/and a kinase binding polypeptide,
[0032] (ii) contacting a compound with the cell or/and the organism of (i),
[0033] (iii) determining the amount or/and the activity of kinase or/and a kinase binding polypeptide, and
[0034] (iv) selecting a compound which modulates the amount or/and the activity of the kinase or/and the kinase binding polypeptide.

[0035] In a further aspect, the screening method is a screening method for identification of a compound suitable for prevention, alleviation or/and treatment of an influenza virus infection, comprising the steps
[0036] i. providing a cell or/and a non-human organism capable of expressing a gene, wherein the gene or/and gene product thereof is capable of modulating an influenza virus replication,
[0037] ii. contacting a compound with the cell or/and the organism of i.,
[0038] iii. determining the amount or/and the activity of gene product of the gene of (i), and
[0039] iv. selecting a compound which modulates the amount or/and the activity of the gene product of i.

[0040] The gene of (i) is preferably selected from table 1A, 1B and 4, in more preferred embodiments from one of the Tables 1A, 1B or 4. “Modulation” in i. and ii. may be “activation” or “inhibition”, in particular “inhibition”.

[0041] In yet another aspect of the present invention, the screening method is a screening method for identification of genes suitable as targets for the prevention, alleviation or/and prevention of an influenza virus infection, comprising the steps
[0042] (1) providing a cell or/and a transgenic non-human animal capable of expressing, particularly over- or underexpressing a gene,
[0043] (2) contacting the cell or/and the organism of (1) with an influenza virus,
[0044] (3) modulating the expression or/and activity of the gene and determining the amount of influenza virus produced by the cell or/and the organism, and
[0045] (4) selecting a gene the expression or/and activity of which is positively or negatively correlated with reduction of the amount of the influenza virus produced by the cell or/and the organism.

[0046] The at least one kinase or/and kinase binding polypeptide employed in the screening method of the present invention is preferably encoded by a nucleic acid or/and gene selected from Table 1A and Table 1B. Nucleic acids comprising at least one sequence of Tables 1a, 1b, 2 or/and 4 and fragments thereof may be employed in the screening method of the present invention.

[0047] In the context of the present invention, a “target” includes a nucleotide sequence in a gene or/and a genome, a nucleic acid, or/and a polypeptide which is involved in regulation of influenza virus replication in a host cell. The target may be directly or indirectly involved in regulation of influenza virus replication. In particular, a target is suitable for reduction of influenza virus replication, either by activation of the target or by inhibition of the target.

[0048] Examples of targets are genes and partial sequence of genes, such as regulatory sequences. The term “target” also includes a gene product such as RNA, in particular mRNA, tRNA, rRNA, a polypeptide or/and a protein encoded by the target gene. Preferred gene products of a target gene are selected from mRNA, polypeptide(s) and protein(s) encoded by the target gene. The most preferred gene product is a polypeptide or protein encoded by the target gene. A target protein or a target polypeptide may be posttranslationally modified or not.

[0049] “Gene product” of a gene as used herein includes RNA (in particular mRNA, tRNA, rRNA), a polypeptide or/and a protein encoded by said gene.

[0050] In the context of the present invention, “activity” of the gene or/and gene product includes transcription, translation, posttranslational modification, modulation of the activity of the gene or/and gene product. The activity may be modulated by ligand binding, which ligand may be an activator or inhibitor.

[0051] A further subject of the present invention is a pharmaceutical composition comprising at least one inhibitor of influenza virus replication optionally together with pharmaceutically acceptable carriers, adjuvants, diluents or/and additives, for the prevention, alleviation or/and treatment of an influenza virus infection.

[0052] Yet another subject of the present invention is a pharmaceutical composition comprising at least one modulator of a kinase or/and at least one modulator of a kinase binding polypeptide optionally together with pharmaceutically acceptable carriers, adjuvants, diluents or/and additives, for the prevention, alleviation or/and treatment of an influenza virus infection.

[0053] The influenza virus infection may be an influenza A virus infection. The influenza A virus may be selected from influenza A viruses isolated so far from avian and mammalian organisms. In particular, the influenza A virus may be selected from H1N1, H1N2, H1N3, H1N4, H1N5, H1N6, H1N7, H1N9, H2N1, H2N2, H2N3, H2N4, H2N5, H2N7, H2N8, H2N9, H3N1, H3N2, H3N3, H3N4, H3N5, H3N6, H3N8, H4N1, H4N2, H4N3, H4N4, H4N5, H4N6, H4N8, H4N9, H5N1, H5N2, H5N3, H5N6, H5N7, H5N8, H5N9, H6N1, H6N2, H6N3, H6N4, H6N5, H6N6, H6N7, H6N8, H6N9, H7N1, H7N2, H7N3, H7N4, H7N5, H7N7, H7N8, H7N9, H9N1, H9N2, H9N3, H9N5, H9N6, H9N7, H9N8, H10N1, H10N3, H10N4, H10N6, H10N7, H10N8, H10N9, H11N2, H11N3, H11N6, H11N9, H12N1, H12N4, H12N5, H12N9, H13N2, H13N6, H13N8, H13N9, H14N5, H15N2, H15N8, H15N9 and H16N3. More particularly, the influenza A virus is strain Puerto Rico/8/34 or the Avian Influenza virus isolate H5N1. The influenza virus as described herein may be employed in the screening method of the present invention.

[0054] The inhibitor of influenza virus replication or/and the modulator employed in the pharmaceutical compositions of the present invention is preferably selected from the group consisting of nucleic acids, nucleic acid analogues such as ribozymes, peptides, polypeptides, and antibodies. The modulator as described herein may also be employed in the screening method of the present invention.

[0055] The inhibitor of influenza virus replication or/and the modulator may also be a compound having a molecular weight smaller than 1000 Dalton.

[0056] The pharmaceutical composition of the present invention may comprise at least one inhibitor of influenza virus replication, wherein the at least one inhibitor of influenza virus replication modulates the expression of a gene selected from Table 1A, Table 1B, and Table 4, or/and a gene product thereof. In particular, the at least one inhibitor of influenza virus replication inhibits the expression of a gene selected from Table 1B and Table 4 or/and a gene product thereof, or the at least one inhibitor of influenza virus replication activates the expression of a gene selected from Table 1A or/and a gene product thereof.

[0057] The pharmaceutical composition of the present invention may comprise a modulator of a kinase or/and a modulator of a kinase binding polypeptide, wherein the at least one kinase or/and kinase binding polypeptide is encoded by a nucleic acid or/and gene selected from Table 1A and Table 1B. Such a kinase or/and kinase binding polypeptide may thus be the target of the modulator.

[0058] The pharmaceutical composition of the present invention may comprise at least one modulator which is an activator. The pharmaceutical composition of the present invention may comprise at least one activator comprising
[0059] (a) a nucleotide sequence selected from Table 1A or/and a fragment thereof, or/and
[0060] (b) a fragment which is at least 70%, preferably at least 80%, more preferably at least 90% identical to the sequence of (a),
   or/and at least one activator capable of activating expression or/and gene product activity of a gene comprising sequence (a) or/and (b).

[0061] The pharmaceutical composition of the present invention may comprise at least one modulator which is an inhibitor. Suitable inhibitors are RNA molecules capable of RNA interference. The pharmaceutical composition of the present invention may comprise at least one inhibitor comprising
[0062] (a) a nucleotide sequence selected from Table 1B and 4 or/and a fragment thereof, or
[0063] (b) a sequence which is at least 70%, preferably at least 80%, more preferably at least 90% identical to the sequence of (a),
   or/and at least one inhibitor capable of inhibiting expression or/and gene product activity of a gene comprising sequence (a) or/and (b).

[0064] The activator or/and the inhibitor as described herein may also be employed in the screening methods of the present invention.

[0065] The pharmaceutical composition of the present invention preferably comprises a nucleic acid, wherein the nucleic acid comprises a nucleotide sequence selected from the sequences of Table 2 and Table 4 and fragments thereof. Preferably, the nucleic acid is RNA or DNA.

[0066] In a more preferred embodiment, the pharmaceutical composition of the present invention comprises
[0067] (i) an RNA molecule capable of RNA interference,
[0068] (ii) a precursor of the RNA molecule (i), or/and
[0069] (iii) a DNA molecule encoding the RNA molecule (i) or/and the precursor (ii).

[0070] RNA molecules capable of RNA interference are described in WO 02/44321 which is included herein by reference.

[0071] The RNA molecule of the present invention may be a double-stranded RNA molecule, preferably a double-stranded siRNA molecule with or without a single-stranded overhang alone at one end or at both ends. The RNA molecule may comprise at least one nucleotide analogue or/and deoxyribonucleotide.

[0072] The DNA molecule as employed in the present invention may be a vector.

[0073] The nucleic acid employed in the present invention may be an antisense nucleic acid or a DNA encoding the antisense nucleic acid.

[0074] The nucleic acid or/and nucleic acid fragment employed in the present invention may have a length of at least 15, preferably at least 17, more preferably at least 19, most preferably at least 21 nucleotides. The nucleic acid or/and the nucleic acid fragment may have a length of at the maximum 29, preferably at the maximum 27, more preferably at the maximum 25, especially more preferably at the maximum 23, most preferably at the maximum 21 nucleotides.

[0075] In another preferred embodiment, the pharmaceutical composition of the present invention comprises an antibody, wherein the antibody may be directed against a kinase or/and kinase binding polypeptide.

[0076] Preferably the antibody is directed against a kinase or/and kinase binding polypeptide comprising
[0077] (a) an amino acid sequence encoded by a nucleic acid or/and gene selected from Table 1A, and Table 1B, or/and
[0078] (b) an amino acid sequence which is at least 70%, preferably at least 80%, more preferably at least 90% identical to the sequence of (a).

[0079] In another preferred embodiment, the antibody is directed against a polypeptide comprising
[0080] (a) an amino acid sequence encoded by a nucleic acid or/and gene selected from Table 4, or/and
[0081] (b) an amino acid sequence which is at least 70%, preferably at least 80%, more preferably at least 90% identical to the sequence of (a).

[0082] The antibody of the present invention may be a monoclonal or polyclonal antibody, a chimeric antibody, a chimeric single chain antibody, a Fab fragment or a fragment produced by a Fab expression library.

[0083] Techniques of preparing antibodies of the present invention are known by a skilled person. Monoclonal antibodies may be prepared by the human B-cell hybridoma technique or by the EBV-hybridoma technique (Köhler et al., 1975, Nature 256:495-497, Kozbor et al., 1985, J. Immunol. Methods 81, 31-42, Cote et al., PNAS, 80:2026-2030, Cole et al., 1984, Mol. Cell Biol. 62:109-120). Chimeric antibodies (mouse/human) may be prepared by carrying out the methods of Morrison et al. (1984, PNAS, 81:6851-6855), Neuberger et al. (1984, 312:604-608) and Takeda et al. (1985, Nature 314:452-454). Single chain antibodies may be prepared by techniques known by a person skilled in the art.

[0084] Recombinant immunoglobulin libraries (Orlandi et al, 1989, PNAS 86:3833-3837, Winter et al., 1991, Nature 349:293-299) may be screened to obtain an antibody of the present invention. A random combinatory immunoglobulin library (Burton, 1991, PNAS, 88:11120-11123) may be used to generate an antibody with a related specifity having a different idiotypic composition.

[0085] Another strategy for antibody production is the in vivo stimulation of the lymphocyte population.

[0086] Furthermore, antibody fragments (containing F(ab′)₂ fragments) of the present invention can be prepared by protease digestion of an antibody, e.g. by pepsin. Reducing the disulfide bonding of such F(ab′)₂ fragments results in the Fab fragments. In another approach, the Fab fragment may be directly obtained from an Fab expression library (Huse et al., 1989, Science 254:1275-1281).

[0087] Polyclonal antibodies of the present invention may be prepared employing an amino acid sequence encoded by a nucleic acid or/and gene selected from Table 1A and Table 1B or immunogenic fragments thereof as antigen by standard immunization protocols of a host, e.g. a horse, a goat, a rabbit, a human, etc., which standard immunization protocols are known by a person skilled in the art.

[0088] The antibody may be an antibody specific for a gene product of a target gene, in particular an antibody specific for a polypeptide or protein encoded by a target gene.

[0089] The antibody as described herein may also be employed in the screening method of the present invention.

[0090] Fragments of polypeptides or/and peptides as employed in the present invention, in particular fragments of an amino acid sequence encoded by a nucleic acid or/and gene selected from Table 1A, Table 1B and Table 4 may have a length of at least 5 amino acid residues, preferably at least 10, more preferably at least 20 amino acid residues. The length of said fragments may be 200 amino acid residues at the maximum, preferably 100 amino acid residues at the maximum, more preferably 60 amino acid residues at the maximum, most preferably 40 amino acid residues at the maximum.

[0091] In the screening methods of the present invention, modulating the expression of a gene may be downregulation or upregulation, in particular of transcription or/and translation.

[0092] It can easily be determined by a skilled person if a gene is upregulated or downregulated. In the context of the present invention, upregulation of gene expression may be an upregulation by a factor of at least 2, preferably at least 4. Downregulation in the context of the present invention may be a reduction of gene expression by a factor of at least 2, preferably at least 4. Most preferred is essentially complete inhibition of gene expression, e.g. by RNA interference.

[0093] “Decrease (increase) of the amount” may be a downregulation (upregulation) of gene expression by a factor of at least 2, preferably at least 4. In the case of reduction, essentially complete inhibition of gene expression is most preferred, e.g. by RNA interference.

[0094] Modulation of the activity of a gene may be decreasing or increasing of the activity.

[0095] “Decrease (increase) of the activity” may be a decrease (increase) of activity of a gene or gene product by a factor of at least 2, preferably at least 4. In the case of activity reduction, essentially complete inhibition of activity is most preferred.

[0096] Modulation may be performed by a single nucleic acid species or by a combination of nucleic acids comprising 2, 3 4, 5, 6 or even more different nucleic acid species, which may be selected from Tables 1a, 1b or/and 2 and fragments thereof. Preferred combinations are described in Table 3 (also referred herein as “pools”). Table 3 includes combinations of at least two kinase or/and kinase binding polypeptide genes. It is also preferred that the combination modulates one gene, for instance selected from Table 1a and 1b. A combination of two nucleic acid species is preferred. More preferred is a combination of two nucleic acids of Table 2. Most preferred is a combination of two nucleic acids of Table 2, which modulate one gene.

[0097] Modulation may be a knock-down performed by RNA interference. The nucleic acid or the combination of nucleic acid species may be an siRNA, which may comprise a sequence selected from the sequences of Table 2 and Table 4 and fragments thereof. It is preferred that the combination knocks down one gene, for instance selected from Table 1b and Table 4. A combination of two siRNA species is preferred, which may be selected from those sequences of Table 2, which are derived from genes of Table 1b, and the sequences of Table 4, wherein the combination preferably knocks down one gene.

[0098] The gene employed in the various embodiments of the present invention may be selected from any of the Tables 1A, 1 B, 2, or 4, or any combination thereof. A gene which when expressed or up-regulated is capable of modulating influenza virus replication may be selected from Tables 1A and 1B, from Tables 1A, 1B and 4, from Table 1A, 1B, 2 and 4. A gene which when expressed or up-regulated is capable of inhibiting influenza virus replication may be selected from Table 1B, from Tables 1B and 4, or from Tables 1B, 2 and 4. A gene which when expressed or up-regulated is capable of activating influenza virus replication may be selected from Table 1A, or from Tables 1A and 2.

[0099] The cell employed in any of the screening methods of the present invention may be any cell capable of being infected with in influenza virus. Preferably the cell is a mammalian cell or an avian cell. More preferably the cell is a human cell. Even more preferred is an epithelial cell. Most preferred is a lung epithelial cell. The cell may be a cell line. A suitable lung epithelial cell line is A594. Another suitable cell is the human embryonic kidney cell line 293T.

[0100] The modulator of a target gene or/and a gene product thereof as described herein may be used for the manufacture of a pharmaceutical composition for prevention, alleviation or/and prevention of an influenza virus infection.

[0101] Another subject of the present invention is the use of a inhibitor of influenza virus replication as described herein, for the prevention, alleviation or/and prevention of an influenza virus infection. Preferred is the use of an inhibitor capable of inhibiting the expression of a gene selected from Table 1b and 4, for the manufacture of a medicament for the prevention, alleviation or/and prevention of an influenza virus infection. Also preferred is the use of an inhibitor capable of inhibiting a gene product of a gene selected from Table 1b and 4, for the manufacture of a medicament for the prevention, alleviation or/and prevention of an influenza virus infection.

[0102] Yet another subject of the present invention is the use of a kinase modulator or/and a kinase binding protein modulator for the manufacture of a medicament for the prevention, alleviation or/and prevention of an influenza virus infection.

[0103] Yet another aspect of the present invention is the use of a nucleic acid comprising a gene sequence or/and a nucleotide sequence of Table 1a, 1b, 2 or/and 4 and fragments thereof in a method for screening for compounds or/and targets suitable for the prevention, alleviation or/and treatment of an influenza virus infection.

[0104] The invention is further illustrated by the following figures, tables and examples.

### FIGURE AND TABLE LEGENDS

[0105] FIG. 1: The experimental setting of the siRNA kinase screen of the example.

[0106] FIG. 2: The effect of transfected (control)-siRNAs in regard to luminescence data. This diagram shows a typical screening result from one 96 well plate. During all experiments several controls were included in triplets, like uninfected, transfected with a siRNA against luciferase, mock treated and siRNAs against the viral nucleoprotein gene (NP) from influenza A viruses. The difference of the luminescence between cells treated with luciferase siRNAs and anti-NP siRNAs was set to 100% inhibition per definition.

[0107] FIG. 3: The inhibition of influenza virus replication shown for all siRNAs tested in the example.

[0108] FIG. 4: The values “% inhibition” from all analyzed siRNAs were used to calculate the z-scores. Highly efficient siRNAs are labelled in pink showing more than 50% inhibition compared to the luciferase siRNA transfected control cells.

[0109] FIG. 5: The experimental setup of the genome wide siRNA screen (see Example 4).

[0110] Table 1: Results of the siRNa kinase screen: a: activation (“negative” inhibition) of virus replication in %, normalized against the cell number, and the standard deviation calculated using four independent experiments. b: inhibition of virus replication in %, normalized against the cell number, and the standard deviation calculated using four independent experiments. Pool X, wherein X denotes the number of the pool, refers to combinations described in Table 3.

[0111] Table 2: Oligonucleotide sequences employed in the siRNA kinase screen of example 1. Knock-down of a particular gene was performed (a) by a combination of two oligonucleotide sequences (“target 1” and “target 2”) specific for said gene, or (b) by pooled oligonucleotides specific for different genes (“Pool X”, wherein X denotes the number of the pool described in Table 3).

[0112] Table 3: Oligonucleotide pools employed in the siRNA kinase screen of the example.

[0113] Table 4: Oligonucleotide sequences employed in the siRNA screen of example 4. Up to four oligonucleotide sequences (“target sequence 1”, “target sequence 2”, “target sequence 3”, and “target sequence 4”) specific for a gene were employed (each in a separate test).

### EXAMPLE 1

[0114] Since kinases are one of the most promising candidates that can influence virus progeny we used siRNAs against this group of genes to identify the individual role of each kinase or kinase binding polypeptide in respect of a modified replication of influenza viruses. All siRNAs were tested in four independent experiments. Since siRNAs against kinases can influence the replication of cells or are even cytotoxic, the effect of each individual siRNA transfection in regard to the cell number was analysed by using an automatic microscope. The amount of replication competent influenza viruses was quantified with an influenza reporter plasmid that was constructed using a RNA polymerase I promoter/terminator cassette to express RNA transcripts encoding the firefly luciferase flanked by the untranslated regions of the influenza A/WSN/33 nucleoprotein (NP) segment. Human embryonic kidney cells (293T) were transfected with this indicator plasmid one day before influenza infection. These cells were chosen, because they show a very strong amplification of the luciferase expression after influenza A virus infection. The cell based assay comprised the following steps (also FIG. 1 which describes the experimental setting of the siRNA kinase screen):
[0115] Day 1: Seeding of A549 cells (lung epithelial cells) in 96-well plates
[0116] Day 2: Transfection with siRNAs directed against kinases or kinase binding proteins
[0117] Day 3: Infection with influenza ANVSN/33+transfection of 293T cells with the influenza indicator plasmid
[0118] Day 4: Infection of 293T cells with the supernatant of A549 cells+determination of cell number by the automatic microscope
[0119] Day 5: Lysis of the indicator cells and performing the luciferase assay to quantify virus replication

[0120] For the identification of influenza relevant kinases the luminescence values were normalised against the cell number (measured after siRNA transfection and virus infection). Thereby unspecific effects due to the lower (or higher) cell numbers can be minimized.

[0121] Several controls were included to be able to demonstrate an accurate assay during the whole screening procedure (FIG. 2). The control siRNA against the viral nucleoprotein could nearly reduce the replication to levels of uninfected cells.

[0122] The illustration of the inhibition in percentage shows that some siRNAs can enhance the influenza virus replication, whereas others can inhibit the replication stronger (>113%) than the antiviral control siRNA against the influenza NP gene (FIG. 3). Thereby 47 siRNA decreased the replication more than 50%, 9 siRNAs showed more than 80% inhibition. The list of the results is provided in Table 1a and 1b, showing the activation (Table 1a, “negative” inhibition) and inhibition (Table 1b) of virus replication in %, normalized against the cell number, and the standard deviation calculated using four independent experiments.

[0123] Similar results were obtained using the calculation of z-scores. The z-score represents the distance between the raw score and the population mean in units of the standard deviation. The z-scores were calculated using the following equation:

$$z = \frac{X - μ}{σ} .$$

where X is a raw score to be standardized, σ is the standard deviation of the population, and μ is the mean of the population.

### EXAMPLE 2

[0124] In a future experiment the antiviral effect will be validated in more detail by using individual siRNAs instead of pooled siRNAs. Furthermore new siRNAs (at least two additional siRNAs per identified gene) will be tested using the experimental setting of Example 1. Those confirmed genes that seem to be important for the replication of influenza viruses will then be knocked down in mice using intranasally administered siRNAs. For the evaluation of this antiviral therapy it is of highest importance to determine the efficiency of transportation of compounds to lung epithelial tissue. The success of a therapy depends on the combination of high efficient kinase inhibitors and adequate transport system. A potentially compatible and cost efficient agent is chitosan which we are applying for the delivery of siRNAs in in vivo studies successfully. We will apply the compounds either intranasally or administer them directly into the lung.

[0125] Efficient siRNAs should lead to a decreased viral titre within the lung tissue and due to this animals should be protected against an otherwise lethal influenza infection.

[0126] For testing the biological effect of the kinase inhibitors, we will divide the experiments in four parts:
[0127] 1. Analysis of the kinase inhibitor distribution in the respiratory apparatus after intranasal application of compound/chitosan nano particles. Optimisation of the compound/chitosan concentration for best effectiveness. Further tests will only be performed in case of success.
[0128] 2. In LD50 tests the absolute pathogenicity of the virus isolates Influenza A/Puerto Rico/8/34 and the Avian Influenza isolate (for test 4) will be estimated.
[0129] 3. Test of antiviral effect of selected siRNAs after intranasal application and infection with Influenza A/Puerto Rico/8/34 by analyzing virus titre in lung tissue or survival rate (in certain cases).
[0130] 4. Test of antiviral effect of selected siRNAs after intranasal application and infection with highly pathogenic Avian Influenza virus isolate (such as H5N1) by analyzing the virus titre in lung tissue or survival rate (in certain cases).

[0131] The used virus isolate is dependant on current development and spreading of the Avian Influenza. We aim at inhibiting the replication of the current prevalent strain in vivo efficiently

[0132] Kinase inhibitors against the confirmed genes will also be tested in mice regarding to an impaired virus replication.

[0133] The Max-Planck-Institut für lnfektionsbiologie, Berlin, Germany, has genome-wide RNAi libraries that, in principle, enable the shutting-off of every single human gene in suitable cell cultures (A549 cells). So in the next level the screen will be expanded to a genome wide scale, because many additional cellular factors involved in the attachment, replication and budding of viruses are still unknown.

### EXAMPLE 3

[0134] Additional siRNAs (not only siRNAs against kinases or kinase binding proteins) will also be validated in regard to a decline of the replication of influenza A viruses. For the evaluation of these siRNAs the same experimental setting will be used as described in example 1, except that the cell number is quantified indirectly by using a commercial cell viability assay (instead of using an automated microscope) and that these siRNAs will be reverse transfected, i.e. cells will be added to the siRNA transfection mix already prepared in 384 well plates.

### EXAMPLE 4

[0135] Among the human genome hundreds of genes are presumably relevant for the replication of influenza viruses. Therefore the screening procedure of kinases and kinase binding factors (described in Example 1) was expanded to a genome wide scale analysing all known human genes by using about 59886 siRNAs.

[0136] The experimental setup was performed in a similar way as described in Example 1, except:
[0137] The screen was extended to genome wide level using 59886 siRNAs
[0138] Cells were seeded in 384 well plates.
[0139] Because of the huge number of transfected cells, not all cell numbers could be analysed by automated microscopy.
[0140] siRNAs were reversely transfected in freshly seeded A549 cells using the transfection reagent HiperFect (Qiagen, Hilden, Germany).
[0141] Knock-down of a particular gene was independently performed by up to four siRNAs (“target sequence 1”, “target sequence 2”, “target sequence 3”, and “target sequence 4” in Table 4) specific for a particular gene.
[0142] Additional controls were included: “AllStars Negative Control siRNA” (Qiagen, Hilden, Germany, Order No. 1027280) as negative control, siRNAs directed against PKMYT (GeneID: 9088, GenBank accession number: NM_target 182687, sequence: CTGGGAGGAACTTACCGTCTA) as positive control (cellular factor against influenza replication), siRNAs directed against PLK (GeneID: 5347, GenBank accessionnumber: BC014135, target sequence: CCGGATCAAGAAGAATGAATA) as transfection control (cytotoxic after transfection).
[0143] The infection rate of transfected A549 cells in selected wells is measured by automated microscopy to be able to dissect the inhibitory effects to early or late events during the infection process.
[0144] Results were analysed by the statistical R-package “ceIIHTS” software, developed by Michael Butros, Ligia Bras and Wolfgang Huber, using the B-score normalisation method (based on “Allstars Negative Control siRNA” transfected control wells).
[0145] Read-out is inhibition of virus replication.

[0146] The siRNAs and corresponding genes that showed a strong antiviral activity (z-scores<−2.0) are listed in Table 4.

[0147] The cell based assay comprised the following steps (see also FIG. 5 which describes the experimental setup of the genome wide siRNA screen:
[0148] Day 1: Seeding of A549 cells (lung epithelial cells)+reverse transfection of siRNAs
[0149] Day 3: Infection with influenza A/WSN/33+transfection of 293T cells zq with indicator plasmid
[0150] Day 4: Infection of 293T cells with the supernatant of A549 cells+fixation of A549 cells with formaldehyde
[0151] Day 5: Luciferase Assay to quantify virus replication in 293T cells
[0152] Day x: Determination of infection rate by the automated microscope.

The application's sequence listing, which the Patent Office published only in electronic form, follows.

SEQUENCE LISTING (17382 sequences)

SEQ ID NO: 1 - DNA, 21 bp, Homo sapiens
ctccaacgtgtcagccaacaa

SEQ ID NO: 2 - DNA, 21 bp, Homo sapiens
tccgctgagatcagaaggcaa

SEQ ID NO: 3 - DNA, 21 bp, Homo sapiens
cagcctccgtatacatatgta

SEQ ID NO: 4 - DNA, 21 bp, Homo sapiens
cccgaggtcatcctgcgtcaa

SEQ ID NO: 5 - DNA, 21 bp, Homo sapiens
caggcgagactccttataata

SEQ ID NO: 6 - DNA, 21 bp, Homo sapiens
tcgcagatgcgctattatcta

SEQ ID NO: 7 - DNA, 21 bp, Homo sapiens
cagattgaggagcatgccata

SEQ ID NO: 8 - DNA, 21 bp, Homo sapiens
tagaagagtcattacaccata

SEQ ID NO: 9 - DNA, 21 bp, Homo sapiens
aagggcaagattatttgctta

SEQ ID NO: 10 - DNA, 21 bp, Homo sapiens
ccgaaggatgttggtcctaga

SEQ ID NO: 11 - DNA, 21 bp, Homo sapiens
ccctttgtggactttatttaa

SEQ ID NO: 12 - DNA, 21 bp, Homo sapiens
ccgggagatctgcctactcaa

SEQ ID NO: 13 - DNA, 21 bp, Homo sapiens
aacccgttacttagctgtgta

SEQ ID NO: 14 - DNA, 21 bp, Homo sapiens
caggttggatacggatggcat

SEQ ID NO: 15 - DNA, 21 bp, Homo sapiens
tccatcgatctggaatttata

SEQ ID NO: 16 - DNA, 21 bp, Homo sapiens
ttggtcgtgtgaattattaaa

SEQ ID NO: 17 - DNA, 21 bp, Homo sapiens
atcatatacttcagacatcaa

SEQ ID NO: 18 - DNA, 21 bp, Homo sapiens
cacgttaaatcaaggaaggaa

SEQ ID NO: 19 - DNA, 21 bp, Homo sapiens
gcgggatttgttgaagagaaa

SEQ ID NO: 20 - DNA, 21 bp, Homo sapiens
tagtatagttgaaataagaaa

SEQ ID NO: 21 - DNA, 21 bp, Homo sapiens
aacctggagtatcatattata

SEQ ID NO: 22 - DNA, 21 bp, Homo sapiens
accaagatacttgagtgatta

SEQ ID NO: 23 - DNA, 21 bp, Homo sapiens
ctgcaggaatttagtaacatt

SEQ ID NO: 24 - DNA, 21 bp, Homo sapiens
tccgataatcttgcagtgcaa

SEQ ID NO: 25 - DNA, 21 bp, Homo sapiens
caccgagttcgtcaaccacta

SEQ ID NO: 26 - DNA, 21 bp, Homo sapiens
caggaagacgctggaataaga

SEQ ID NO: 27 - DNA, 21 bp, Homo sapiens
aaccatgagtctagtacttaa

SEQ ID NO: 28 - DNA, 21 bp, Homo sapiens
ttggcttatacgcgcagtgta

SEQ ID NO: 29 - DNA, 21 bp, Homo sapiens
cagctcgaaactgtttggtaa

SEQ ID NO: 30 - DNA, 21 bp, Homo sapiens
ccctttatgattacatgccaa

SEQ ID NO: 31 - DNA, 21 bp, Homo sapiens
aaggtaatccggagtgagcaa

SEQ ID NO: 32 - DNA, 21 bp, Homo sapiens
ccgaactgaccgggagatcaa

SEQ ID NO: 33 - DNA, 21 bp, Homo sapiens
aagctttaagagtcatttata

SEQ ID NO: 34 - DNA, 21 bp, Homo sapiens
tacactggtcccaaagtgtaa

SEQ ID NO: 35 - DNA, 21 bp, Homo sapiens
cacgccctaagcgcacattca

SEQ ID NO: 36 - DNA, 21 bp, Homo sapiens
caggtgtgccacattcgctaa

SEQ ID NO: 37 - DNA, 21 bp, Homo sapiens
ccgaatgaagaacacgaccaa

SEQ ID NO: 38 - DNA, 21 bp, Homo sapiens
cggaggagcgttgccattcaa

SEQ ID NO: 39 - DNA, 21 bp, Homo sapiens
accctacgttaccgtgctcaa

SEQ ID NO: 40 - DNA, 21 bp, Homo sapiens
ccgatgttattagatgttaca

SEQ ID NO: 41 - DNA, 21 bp, Homo sapiens
ccaccacttaagtgacataaa

SEQ ID NO: 42 - DNA, 21 bp, Homo sapiens
ctgagggtagcccatttataa

SEQ ID NO: 43 - DNA, 21 bp, Homo sapiens
ccggccgtgctacaataggta

SEQ ID NO: 44 - DNA, 21 bp, Homo sapiens
cggccgtgctacaataggtaa

SEQ ID NO: 45 - DNA, 21 bp, Homo sapiens
cgggagattcagatcctcaaa

SEQ ID NO: 46 - DNA, 21 bp, Homo sapiens
tccgggaggcgcagacactta

SEQ ID NO: 47 - DNA, 21 bp, Homo sapiens
tagccgcaccatcctatacta

SEQ ID NO: 48 - DNA, 21 bp, Homo sapiens
tagggtgggtaaggccttata

SEQ ID NO: 49 - DNA, 21 bp, Homo sapiens
cacggttgaatgtaaggctta

SEQ ID NO: 50 - DNA, 21 bp, Homo sapiens
ctcgcacctttccaaagttaa

SEQ ID NO: 51 - DNA, 21 bp, Homo sapiens
accgagggaatcatcatgaaa

SEQ ID NO: 52 - DNA, 21 bp, Homo sapiens
cgcgccgtgatgaatatcgaa

SEQ ID NO: 53 - DNA, 21 bp, Homo sapiens
taggattcattgagttggtta

SEQ ID NO: 54 - DNA, 21 bp, Homo sapiens
ttccgccttgttggtctgaaa

SEQ ID NO: 55 - DNA, 21 bp, Homo sapiens
aacagatcagtgccaatataa

SEQ ID NO: 56 - DNA, 21 bp, Homo sapiens
aaggactttcgggaacgagaa

SEQ ID NO: 57 - DNA, 21 bp, Homo sapiens
cacaattatagattagatcaa

SEQ ID NO: 58 - DNA, 21 bp, Homo sapiens
gaggaacggatcagatgtcta

SEQ ID NO: 59 - DNA, 21 bp, Homo sapiens
ccgcctaacaaggtagatgaa

SEQ ID NO: 60 - DNA, 21 bp, Homo sapiens
ccggattcttagtcacatata

SEQ ID NO: 61 - DNA, 21 bp, Homo sapiens
agggctgttcgtggtcagtta

SEQ ID NO: 62 - DNA, 21 bp, Homo sapiens
tcgatgggtctttgaatagaa

SEQ ID NO: 63 - DNA, 21 bp, Homo sapiens
ctgcatgcactgcatatgaaa

SEQ ID NO: 64 - DNA, 21 bp, Homo sapiens
tacgggcactgggtaaagaaa

SEQ ID NO: 65 - DNA, 21 bp, Homo sapiens
cagtttgtgtgtcttaattat

SEQ ID NO: 66 - DNA, 21 bp, Homo sapiens
ctggcattagaattatttaaa

SEQ ID NO: 67 - DNA, 21 bp, Homo sapiens
ccgcttggcgatgccagccaa

SEQ ID NO: 68 - DNA, 21 bp, Homo sapiens
gcggtgggcctggttaaataa

SEQ ID NO: 69 - DNA, 21 bp, Homo sapiens
caggagtgtgcggtcaatatt

SEQ ID NO: 70 - DNA, 21 bp, Homo sapiens
gagggccgtcaagatcctcaa

SEQ ID NO: 71 - DNA, 21 bp, Homo sapiens
acgggccagattgtaagctta

SEQ ID NO: 72 - DNA, 21 bp, Homo sapiens
tcggtgctacttaacaactta

SEQ ID NO: 73 - DNA, 21 bp, Homo sapiens
ccgggatgccatggtggccaa

SEQ ID NO: 74 - DNA, 21 bp, Homo sapiens
gcggctggagacctattacaa

SEQ ID NO: 75 - DNA, 21 bp, Homo sapiens
aagttgcaaagtggaattaaa

SEQ ID NO: 76 - DNA, 21 bp, Homo sapiens
ttggtataaattaatttgtta

SEQ ID NO: 77 - DNA, 21 bp, Homo sapiens
cagggctgacatcctaataaa

SEQ ID NO: 78 - DNA, 21 bp, Homo sapiens
cccggcgaggagaacggcaaa

SEQ ID NO: 79 - DNA, 21 bp, Homo sapiens
ccgcaacgtcctgctggttaa

SEQ ID NO: 80 - DNA, 21 bp, Homo sapiens
ggcgtagatcaccagaataaa

SEQ ID NO: 81 - DNA, 21 bp, Homo sapiens
cggatggtgagcaatggtata

SEQ ID NO: 82 - DNA, 21 bp, Homo sapiens
ctggtctgtctttggataata

SEQ ID NO: 83 - DNA, 21 bp, Homo sapiens
cagctcatgaatgactttgta

SEQ ID NO: 84 - DNA, 21 bp, Homo sapiens
tacggtcatgtggacatccat

SEQ ID NO: 85 - DNA, 21 bp, Homo sapiens
aagggtatggtaatgcttgta

SEQ ID NO: 86 - DNA, 21 bp, Homo sapiens
tagtttgatagtgccacttaa

SEQ ID NO: 87 - DNA, 21 bp, Homo sapiens
caggcactaattgttcttcaa

SEQ ID NO: 88 - DNA, 21 bp, Homo sapiens
gccgctaatcttctaacatta

SEQ ID NO: 89 - DNA, 21 bp, Homo sapiens
aacgaatgtaataaagaccta

SEQ ID NO: 90 - DNA, 21 bp, Homo sapiens
acggatattgtttcacgatga

SEQ ID NO: 91 - DNA, 21 bp, Homo sapiens
aagcaccgaagcgaaacttaa

SEQ ID NO: 92 - DNA, 21 bp, Homo sapiens
ctcgtaagtatgtaaaggaaa

SEQ ID NO: 93 - DNA, 21 bp, Homo sapiens
acgagaatacctaatatgtga

SEQ ID NO: 94 - DNA, 21 bp, Homo sapiens
cagatttagcacatttactat

SEQ ID NO: 95 - DNA, 21 bp, Homo sapiens
caagagtttactcaacaagaa

SEQ ID NO: 96 - DNA, 21 bp, Homo sapiens
ccggaagcaggagatcattaa

SEQ ID NO: 97 - DNA, 21 bp, Homo sapiens
ccgcctgcatagcatatatta

SEQ ID NO: 98 - DNA, 21 bp, Homo sapiens
gtgcgacttcatgatagcata

SEQ ID NO: 99 - DNA, 21 bp, Homo sapiens
atggatatgttccagaaggta

SEQ ID NO: 100 - DNA, 21 bp, Homo sapiens
cagactggatttggagatgga

SEQ ID NO: 101 - DNA, 21 bp, Homo sapiens
aagactcaaggtggtcagtaa

SEQ ID NO: 102 - DNA, 21 bp, Homo sapiens
tctgaagtgtttgacatttaa

SEQ ID NO: 103 - DNA, 21 bp, Homo sapiens
ccagctggacagaatattcaa

SEQ ID NO: 104 - DNA, 21 bp, Homo sapiens
ttcgagagcttaagcatccaa

SEQ ID NO: 105 - DNA, 21 bp, Homo sapiens
tagggacatgaaggctgctaa

SEQ ID NO: 106 - DNA, 21 bp, Homo sapiens
tgggcacagtttggtccgtta

SEQ ID NO: 107 - DNA, 21 bp, Homo sapiens
caggcttatgaatatatttaa

SEQ ID NO: 108 - DNA, 21 bp, Homo sapiens
tgcctctactttatcaattaa

SEQ ID NO: 109 - DNA, 21 bp, Homo sapiens
aagaaagagatctgtatcaat

SEQ ID NO: 110 - DNA, 21 bp, Homo sapiens
cccgcacaggtctttccttat

SEQ ID NO: 111 - DNA, 21 bp, Homo sapiens
agccggcgattagatactgaa

SEQ ID NO: 112 - DNA, 21 bp, Homo sapiens
ccggcccttaccaaacctgat

SEQ ID NO: 113 - DNA, 21 bp, Homo sapiens
caggagaagttcggtttagta

SEQ ID NO: 114 - DNA, 21 bp, Homo sapiens
ttccataagcttggtgacaaa

SEQ ID NO: 115 - DNA, 21 bp, Homo sapiens
cagctacagacgcaacgatta

SEQ ID NO: 116 - DNA, 21 bp, Homo sapiens
tcgcctggattgggatgagaa

SEQ ID NO: 117 - DNA, 21 bp, Homo sapiens
cacgaagatctcggtccagaa

SEQ ID NO: 118 - DNA, 21 bp, Homo sapiens
ctgcattctctttgagtacta

SEQ ID NO: 119 - DNA, 21 bp, Homo sapiens
cagagaactgcggttacttaa

SEQ ID NO: 120 - DNA, 21 bp, Homo sapiens
ctcagtgatacgtacagccaa

SEQ ID NO: 121 - DNA, 21 bp, Homo sapiens
aagaatctctatacaaatgaa

SEQ ID NO: 122 - DNA, 21 bp, Homo sapiens
taggaaagaatctctatacaa

SEQ ID NO: 123 - DNA, 21 bp, Homo sapiens
caggtccctcactaccgacaa

SEQ ID NO: 124 - DNA, 21 bp, Homo sapiens
gtggtgggaatatgaaataaa

SEQ ID NO: 125 - DNA, 21 bp, Homo sapiens
atccatcttctcaacatgcaa

SEQ ID NO: 126 - DNA, 21 bp, Homo sapiens
cacgaccagtgtgccatgaaa

SEQ ID NO: 127 - DNA, 21 bp, Homo sapiens
accgcaaatgtgaattatcaa

SEQ ID NO: 128 - DNA, 21 bp, Homo sapiens
tagccactcacataaagttta

SEQ ID NO: 129 - DNA, 21 bp, Homo sapiens
cagcgacaccaggtttgagaa

SEQ ID NO: 130 - DNA, 21 bp, Homo sapiens
ccggaaggtgacgctcaccaa

SEQ ID NO: 131 - DNA, 21 bp, Homo sapiens
cccagagattgtgaactatga

SEQ ID NO: 132 - DNA, 21 bp, Homo sapiens
ccggcagaagggcacgggcaa

SEQ ID NO: 133 - DNA, 21 bp, Homo sapiens
agggatcaaagaagatggtta

SEQ ID NO: 134 - DNA, 21 bp, Homo sapiens
ccgcctggactgcaaagtgat

SEQ ID NO: 135 - DNA, 21 bp, Homo sapiens
caagaatgggttgccattaaa

SEQ ID NO: 136 - DNA, 21 bp, Homo sapiens
tacggtcgctgactacttgaa

SEQ ID NO: 137 - DNA, 21 bp, Homo sapiens
cagcacggacgtcaagtttga

SEQ ID NO: 138 - DNA, 21 bp, Homo sapiens
caggacgtgagcgacagaata

SEQ ID NO: 139 - DNA, 21 bp, Homo sapiens
ccgggcaattcagtttctaca

SEQ ID NO: 140 - DNA, 21 bp, Homo sapiens
tcccatcgccatgcagatcta

SEQ ID NO: 141 - DNA, 21 bp, Homo sapiens
cagcaacgtcaagagctctaa

SEQ ID NO: 142 - DNA, 21 bp, Homo sapiens
ccagatcatcctgaactggaa

SEQ ID NO: 143 - DNA, 21 bp, Homo sapiens
gaggtattagagggtgctata

SEQ ID NO: 144 - DNA, 21 bp, Homo sapiens
tccacggttgctaaattataa

SEQ ID NO: 145 - DNA, 21 bp, Homo sapiens
ccgggagatcttcgactcata

SEQ ID NO: 146 - DNA, 21 bp, Homo sapiens
cggctggaggctcgcaagaaa

SEQ ID NO: 147 - DNA, 21 bp, Homo sapiens
atgggtgggaatgataggaca

SEQ ID NO: 148 - DNA, 21 bp, Homo sapiens
ccacatgtaaagacttggtta

SEQ ID NO: 149 - DNA, 21 bp, Homo sapiens
acgggctaaagtgaccatgaa

SEQ ID NO: 150 - DNA, 21 bp, Homo sapiens
caagcgtggtgaatacatcaa

SEQ ID NO: 151 - DNA, 21 bp, Homo sapiens
ccgactcatcaagggacgaaa

SEQ ID NO: 152 - DNA, 21 bp, Homo sapiens
ccgggatggcatgagtgtcta

SEQ ID NO: 153 - DNA, 21 bp, Homo sapiens
ccggtgttctaagatgtgata

SEQ ID NO: 154 - DNA, 21 bp, Homo sapiens
tccaagattctagatgattaa

SEQ ID NO: 155 - DNA, 21 bp, Homo sapiens
cagccgtgctgttaaaccaaa

SEQ ID NO: 156 - DNA, 21 bp, Homo sapiens
ctggtaagcgactgtcatcaa

SEQ ID NO: 157 - DNA, 21 bp, Homo sapiens
cccaatatgacaacgaatcaa

SEQ ID NO: 158 - DNA, 21 bp, Homo sapiens
cggaacaaagtttccagtcaa

SEQ ID NO: 159 - DNA, 21 bp, Homo sapiens
acaaaggaattgggaactgta

SEQ ID NO: 160 - DNA, 21 bp, Homo sapiens
caaaggaattgggaactgtaa

SEQ ID NO: 161 - DNA, 21 bp, Homo sapiens
cagaagccttatgctctcaaa

SEQ ID NO: 162 - DNA, 21 bp, Homo sapiens
ttgcaagttaacacaacgtaa

SEQ ID NO: 163 - DNA, 21 bp, Homo sapiens
tcgggaaatttctctattaaa

SEQ ID NO: 164 - DNA, 21 bp, Homo sapiens
ttgactaactatggaagatta

SEQ ID NO: 165 - DNA, 21 bp, Homo sapiens
caagatctacatcgtgatgaa

SEQ ID NO: 166 - DNA, 21 bp, Homo sapiens
caggataaagctcgccgggaa

SEQ ID NO: 167 - DNA, 21 bp, Homo sapiens
cacgtacggagttgtgtacaa

SEQ ID NO: 168 - DNA, 21 bp, Homo sapiens
caggttatatccaatagtaga

SEQ ID NO: 169 - DNA, 21 bp, Homo sapiens
ccggatggctctggacgtgaa

SEQ ID NO: 170 - DNA, 21 bp, Homo sapiens
gaggctttaaggtagctttaa

SEQ ID NO: 171 - DNA, 21 bp, Homo sapiens
acccaagggcagagcatttaa

SEQ ID NO: 172 - DNA, 21 bp, Homo sapiens
atgagttatgagttattcata

SEQ ID NO: 173 - DNA, 21 bp, Homo sapiens
ccagattgaaactctcttcaa

SEQ ID NO: 174 - DNA, 21 bp, Homo sapiens
ccggcctcacccagattgaaa

SEQ ID NO: 175 - DNA, 21 bp, Homo sapiens
gacgggcgagttcaaagggaa

SEQ ID NO: 176 - DNA, 21 bp, Homo sapiens
tccacgcaaagcgataaataa

SEQ ID NO: 177 - DNA, 21 bp, Homo sapiens
cctgcctatctttacaataaa

SEQ ID NO: 178 - DNA, 21 bp, Homo sapiens
gaggttgagcttgttcagata

SEQ ID NO: 179 - DNA, 21 bp, Homo sapiens
aacatctttctgataacatta

SEQ ID NO: 180 - DNA, 21 bp, Homo sapiens
aagaaatctgttcatgttaaa

SEQ ID NO: 181 - DNA, 21 bp, Homo sapiens
ctgtaagatgtttaagataaa

SEQ ID NO: 182 - DNA, 21 bp, Homo sapiens
tcggacaagtacttcgacgaa

SEQ ID NO: 183 - DNA, 21 bp, Homo sapiens
agggctaaaggctgcaacaaa

SEQ ID NO: 184 - DNA, 21 bp, Homo sapiens
caagagtaacatgaaaggttt

SEQ ID NO: 185 - DNA, 21 bp, Homo sapiens
ccggtctaggatcgaaatgtt

SEQ ID NO: 186 - DNA, 21 bp, Homo sapiens
ctccctgacgattccactgta

SEQ ID NO: 187 - DNA, 21 bp, Homo sapiens
gagctttatcgtggttgttaa

SEQ ID NO: 188 - DNA, 21 bp, Homo sapiens
gtggttgttaatttgaagtaa

SEQ ID NO: 189 - DNA, 21 bp, Homo sapiens
caggagtacaatgttcgtgta

SEQ ID NO: 190 - DNA, 21 bp, Homo sapiens
ctgggacaacattcacggaaa

SEQ ID NO: 191 - DNA, 21 bp, Homo sapiens
cacctttgtaaagaatctgta

SEQ ID NO: 192 - DNA, 21 bp, Homo sapiens
cagcacgatggtcctacacat

SEQ ID NO: 193 - DNA, 21 bp, Homo sapiens
acggtgtgaatcacacatcca

SEQ ID NO: 194 - DNA, 21 bp, Homo sapiens
caggaatgatttcctgaaaga

SEQ ID NO: 195 - DNA, 21 bp, Homo sapiens
accggcgatgctgagaaccaa

SEQ ID NO: 196 - DNA, 21 bp, Homo sapiens
ccagagcttcaagactgttta

SEQ ID NO: 197 - DNA, 21 bp, Homo sapiens
aaggccaagtttctacaggaa

SEQ ID NO: 198 - DNA, 21 bp, Homo sapiens
cagcctgaggctgagtaccaa

SEQ ID NO: 199 - DNA, 21 bp, Homo sapiens
cacattgactactataagaaa

SEQ ID NO: 200 - DNA, 21 bp, Homo sapiens
ccgcctgaccttcggacccta

SEQ ID NO: 201 - DNA, 21 bp, Homo sapiens
accgcatatggtatccctcaa

SEQ ID NO: 202 - DNA, 21 bp, Homo sapiens
cactacagtattagcaagcaa

SEQ ID NO: 203 - DNA, 21 bp, Homo sapiens
caggacagtcaaggtgatata

SEQ ID NO: 204 - DNA, 21 bp, Homo sapiens
ctgggagtacctagaacccta

SEQ ID NO: 205 - DNA, 21 bp, Homo sapiens
aagaagcaggatgctgatcta

SEQ ID NO: 206 - DNA, 21 bp, Homo sapiens
aagacatgtggtgtatataaa

SEQ ID NO: 207 - DNA, 21 bp, Homo sapiens
aaggatgttctggacattgaa

SEQ ID NO: 208 - DNA, 21 bp, Homo sapiens
aggcatgtgggcggcacgtaa

SEQ ID NO: 209 - DNA, 21 bp, Homo sapiens
aacactggtcacgtttggaaa

SEQ ID NO: 210 - DNA, 21 bp, Homo sapiens
ctgcatttatcgttaacctaa

SEQ ID NO: 211 - DNA, 21 bp, Homo sapiens
aacgacgggctctgccagaaa

SEQ ID NO: 212 - DNA, 21 bp, Homo sapiens
cgggagcacatcagaggctta

SEQ ID NO: 213 - DNA, 21 bp, Homo sapiens
cactcaggttagcaatatata

SEQ ID NO: 214 - DNA, 21 bp, Homo sapiens
ccggaatgcgatgtctcctta

SEQ ID NO: 215 - DNA, 21 bp, Homo sapiens
caccagcgggctgatcctgaa

SEQ ID NO: 216 - DNA, 21 bp, Homo sapiens
ccggtctaacgtctcacacca

SEQ ID NO: 217 - DNA, 21 bp, Homo sapiens
aaggccattcgaaccactcta

SEQ ID NO: 218 - DNA, 21 bp, Homo sapiens
gacgtaaagattctatgaata

SEQ ID NO: 219 - DNA, 21 bp, Homo sapiens
accggatgaggttctatttca

SEQ ID NO: 220 - DNA, 21 bp, Homo sapiens
cacggataacatcagcttcat

SEQ ID NO: 221 - DNA, 21 bp, Homo sapiens
aacgctgacatgtacggtcta

SEQ ID NO: 222 - DNA, 21 bp, Homo sapiens
aaggctaatacaactcttcaa

SEQ ID NO: 223 - DNA, 21 bp, Homo sapiens
ctgcctggtccgcgagaacaa

SEQ ID NO: 224 - DNA, 21 bp, Homo sapiens
gagcatctaggaagtattaaa

SEQ ID NO: 225 - DNA, 21 bp, Homo sapiens
acagatctttggagtgcctaa

SEQ ID NO: 226 - DNA, 21 bp, Homo sapiens
cctgcagatgcttctaataaa

SEQ ID NO: 227 - DNA, 21 bp, Homo sapiens
cccggacgacttgtctttcaa

SEQ ID NO: 228 - DNA, 21 bp, Homo sapiens
cgggaaatatgggatgtataa

SEQ ID NO: 229 - DNA, 21 bp, Homo sapiens
ctccttcaagaagaacaagaa

SEQ ID NO: 230 - DNA, 21 bp, Homo sapiens
ttgagtttctttgttgaagaa

SEQ ID NO: 231 - DNA, 21 bp, Homo sapiens
aacggcgaaccgcaacatata

SEQ ID NO: 232 - DNA, 21 bp, Homo sapiens
cccgggaacggcgaaccgcaa

SEQ ID NO: 233 - DNA, 21 bp, Homo sapiens
acggattctaaggactctaaa

SEQ ID NO: 234 - DNA, 21 bp, Homo sapiens
gacggattctaaggactctaa

SEQ ID NO: 235 - DNA, 21 bp, Homo sapiens
caggaatactcagatcgggaa

SEQ ID NO: 236 - DNA, 21 bp, Homo sapiens
ccacgtgtctgtgcaccacaa

SEQ ID NO: 237 - DNA, 21 bp, Homo sapiens
cccgacgtctggaggactcaa

SEQ ID NO: 238 - DNA, 21 bp, Homo sapiens
ccggaggagaaacgtcttcga

SEQ ID NO: 239 - DNA, 21 bp, Homo sapiens
aagcggcttgaagtcatcgaa

SEQ ID NO: 240 - DNA, 21 bp, Homo sapiens
caggatgttcactctatttat

SEQ ID NO: 241 - DNA, 21 bp, Homo sapiens
atggagcatccttctccgata

SEQ ID NO: 242 - DNA, 21 bp, Homo sapiens
tgccattaagtttgagtatat

SEQ ID NO: 243 - DNA, 21 bp, Homo sapiens
tacgaggatgttaaacttaaa

SEQ ID NO: 244 - DNA, 21 bp, Homo sapiens
ttacgaggatgttaaacttaa

SEQ ID NO: 245 - DNA, 21 bp, Homo sapiens
atagagcatatttgccaataa

SEQ ID NO: 246 - DNA, 21 bp, Homo sapiens
tagagcatatttgccaataaa

SEQ ID NO: 247 - DNA, 21 bp, Homo sapiens
acgcaccttcctggccgtgaa

SEQ ID NO: 248 - DNA, 21 bp, Homo sapiens
ctgcatcgaggttggcaagaa

SEQ ID NO: 249 - DNA, 21 bp, Homo sapiens
cacatcatcgagaacccacaa

SEQ ID NO: 250 - DNA, 21 bp, Homo sapiens
cgagagcatcctgtaccgtaa

SEQ ID NO: 251 - DNA, 21 bp, Homo sapiens
cacggataactttatcttgtt

SEQ ID NO: 252 - DNA, 21 bp, Homo sapiens
ctggttggagcgaatctgcta

SEQ ID NO: 253 - DNA, 21 bp, Homo sapiens
tccactgattgctgcagctaa

SEQ ID NO: 254 - DNA, 21 bp, Homo sapiens
ttgaagagaactgcaactgaa

SEQ ID NO: 255 - DNA, 21 bp, Homo sapiens
ccgcgaccggatcatacgaaa

SEQ ID NO: 256 - DNA, 21 bp, Homo sapiens
ccggatcatacgaaatcaatt

SEQ ID NO: 257 - DNA, 21 bp, Homo sapiens
caagaaggaattaattattaa

SEQ ID NO: 258 - DNA, 21 bp, Homo sapiens
ttccagtactttgtacaggaa

SEQ ID NO: 259 - DNA, 21 bp, Homo sapiens
aggcttaattcttgcgtataa

SEQ ID NO: 260 - DNA, 21 bp, Homo sapiens
taggcttaattcttgcgtata

SEQ ID NO: 261 - DNA, 21 bp, Homo sapiens
ccgagcaactttgatcaacga

SEQ ID NO: 262 - DNA, 21 bp, Homo sapiens
ctgccgagcaactttgatcaa

SEQ ID NO: 263 - DNA, 21 bp, Homo sapiens
cccgaactagaacttgaagaa

SEQ ID NO: 264 - DNA, 21 bp, Homo sapiens
tcgggtttctataggaaacta

SEQ ID NO: 265 - DNA, 21 bp, Homo sapiens
aagaaccttgttagaccgaga

SEQ ID NO: 266 - DNA, 21 bp, Homo sapiens
taggtctgtgatggtccctaa

SEQ ID NO: 267 - DNA, 21 bp, Homo sapiens
acccgtgtcaattaacattta

SEQ ID NO: 268 - DNA, 21 bp, Homo sapiens
aggcctcttgttcacatcaaa

SEQ ID NO: 269 - DNA, 21 bp, Homo sapiens
aagcggttaggctgtgaggaa

SEQ ID NO: 270 - DNA, 21 bp, Homo sapiens
cacgcctaacaggacgtatta

SEQ ID NO: 271 - DNA, 21 bp, Homo sapiens
ctccacaaagctcacacgata

SEQ ID NO: 272 - DNA, 21 bp, Homo sapiens
ctgcgagaccaagataaatat

SEQ ID NO: 273 - DNA, 21 bp, Homo sapiens
cacgatggcttcgaaggccta

SEQ ID NO: 274 - DNA, 21 bp, Homo sapiens
ccggacctactcgcacctgaa

SEQ ID NO: 275 - DNA, 21 bp, Homo sapiens
cagcactttatgcacgtatta

SEQ ID NO: 276 - DNA, 21 bp, Homo sapiens
ccgcctgaaggctgcttgcaa

SEQ ID NO: 277 - DNA, 21 bp, Homo sapiens
atgggagtgcttggaacttca

SEQ ID NO: 278 - DNA, 21 bp, Homo sapiens
cccaatcgtctgtactatgaa

SEQ ID NO: 279 - DNA, 21 bp, Homo sapiens
caagatggtcgaatcaaggaa

SEQ ID NO: 280 - DNA, 21 bp, Homo sapiens
tacccactaattgcattggaa

SEQ ID NO: 281 - DNA, 21 bp, Homo sapiens
aagggttgtcttcctcgccaa

SEQ ID NO: 282 - DNA, 21 bp, Homo sapiens
cagggtggtccagtccgtcaa

SEQ ID NO: 283 - DNA, 21 bp, Homo sapiens
aacgcgaaagtggaaatcgta

SEQ ID NO: 284 - DNA, 21 bp, Homo sapiens
tcggttggtgcatctaatgaa

SEQ ID NO: 285 - DNA, 21 bp, Homo sapiens
aaacatccttatcgacctcaa

SEQ ID NO: 286 - DNA, 21 bp, Homo sapiens
aaagattgtagtggatctaat

SEQ ID NO: 287 - DNA, 21 bp, Homo sapiens
atcgaagtttgcagagacaaa

SEQ ID NO: 288 - DNA, 21 bp, Homo sapiens
cacctttactctataactcaa

SEQ ID NO: 289 - DNA, 21 bp, Homo sapiens
catctggaacatgaagactaa

SEQ ID NO: 290 - DNA, 21 bp, Homo sapiens
ccagttcatctggaacatgaa

SEQ ID NO: 291 - DNA, 21 bp, Homo sapiens
ccgagagtattgataattcat

SEQ ID NO: 292 - DNA, 21 bp, Homo sapiens
tcggctgatagtggcatgatt

SEQ ID NO: 293 - DNA, 21 bp, Homo sapiens
caaggacaactcaaacttata

SEQ ID NO: 294 - DNA, 21 bp, Homo sapiens
cagaaggtggtgaaactgaaa

SEQ ID NO: 295 - DNA, 21 bp, Homo sapiens
aaccagctggatcgccatcta

SEQ ID NO: 296 - DNA, 21 bp, Homo sapiens
ctggatcgccatctatgagaa

SEQ ID NO: 297 - DNA, 21 bp, Homo sapiens
ccctaagataatagcacaaca

SEQ ID NO: 298 - DNA, 21 bp, Homo sapiens
ttggccctgattcaaccctaa

SEQ ID NO: 299 - DNA, 21 bp, Homo sapiens
cagctagtgccaaataattga

SEQ ID NO: 300 - DNA, 21 bp, Homo sapiens
ctggaccgacctagatttgaa

SEQ ID NO: 301 - DNA, 21 bp, Homo sapiens
acgaacatggatattgttgaa

SEQ ID NO: 302 - DNA, 21 bp, Homo sapiens
cacgccattgggactgtcaaa

SEQ ID NO: 303 - DNA, 21 bp, Homo sapiens
cgcagtggaatgagtccttta

SEQ ID NO: 304 - DNA, 21 bp, Homo sapiens
tacaagttgcttaaccaagaa

SEQ ID NO: 305 - DNA, 21 bp, Homo sapiens
caagagctaagtagatgtgta

SEQ ID NO: 306 - DNA, 21 bp, Homo sapiens
ccggatgaaactgaccgattt

SEQ ID NO: 307 - DNA, 21 bp, Homo sapiens
aacggtgaaagccacgctaaa

SEQ ID NO: 308 - DNA, 21 bp, Homo sapiens
gacctttgtgttcaacctgaa

SEQ ID NO: 309 - DNA, 21 bp, Homo sapiens
cacccaatatcttctcttgta

SEQ ID NO: 310 - DNA, 21 bp, Homo sapiens
taccacgttctatgtctgtaa

SEQ ID NO: 311 - DNA, 21 bp, Homo sapiens
caggacagtaagaccaagatt

SEQ ID NO: 312 - DNA, 21 bp, Homo sapiens
ccgcaaggagctgaagctgaa

SEQ ID NO: 313 - DNA, 21 bp, Homo sapiens
caggaaggcgatcttattgaa

SEQ ID NO: 314 - DNA, 21 bp, Homo sapiens
cctcagtatatttaaactcaa

SEQ ID NO: 315 - DNA, 21 bp, Homo sapiens
cggaagcatgacagcattaaa

SEQ ID NO: 316 - DNA, 21 bp, Homo sapiens
gaccaaatttacgccatgaaa

SEQ ID NO: 317 - DNA, 21 bp, Homo sapiens
aacacttgtcaagaagcgtta

SEQ ID NO: 318 - DNA, 21 bp, Homo sapiens
atcatggtagtcactaacata

SEQ ID NO: 319 - DNA, 21 bp, Homo sapiens
cccgtctaatatataaatata

SEQ ID NO: 320 - DNA, 21 bp, Homo sapiens
ctccctgacccgtctaatata

SEQ ID NO: 321 - DNA, 21 bp, Homo sapiens
aaggatcgttgatcagcatta

SEQ ID NO: 322 - DNA, 21 bp, Homo sapiens
cgccttaaatctaatcagcaa

SEQ ID NO: 323 - DNA, 21 bp, Homo sapiens
caagttcaatttgaaaggaaa

SEQ ID NO: 324 - DNA, 21 bp, Homo sapiens
caggcttcctgttgaaataaa

SEQ ID NO: 325 - DNA, 21 bp, Homo sapiens
cagacccacctttcagcctta

SEQ ID NO: 326 - DNA, 21 bp, Homo sapiens
tacgagatcatcgagaccata

SEQ ID NO: 327 - DNA, 21 bp, Homo sapiens
aagcccagtaatatagtagta

SEQ ID NO: 328 - DNA, 21 bp, Homo sapiens
tcgggacttaaagcccagtaa

SEQ ID NO: 329 - DNA, 21 bp, Homo sapiens
caggatggagctgatccagta

SEQ ID NO: 330 - DNA, 21 bp, Homo sapiens
ctgagcgacgagcacgttcaa

SEQ ID NO: 331 - DNA, 21 bp, Homo sapiens
aaagtcgatttatgtgtatta

SEQ ID NO: 332 - DNA, 21 bp, Homo sapiens
atcgtgaacttgtcctcttaa

SEQ ID NO: 333 - DNA, 21 bp, Homo sapiens
ccgcatgtgtctgtattcata

SEQ ID NO: 334 - DNA, 21 bp, Homo sapiens
tccgagcacaataaactcaaa

SEQ ID NO: 335 - DNA, 21 bp, Homo sapiens
ccggagtggcatgaagctgta

SEQ ID NO: 336 - DNA, 21 bp, Homo sapiens
cgggatgagcctcatccggaa

SEQ ID NO: 337 - DNA, 21 bp, Homo sapiens
ctggaagaattcctgaacaaa

SEQ ID NO: 338 - DNA, 21 bp, Homo sapiens
ctggatcaagtcctgaagaaa

SEQ ID NO: 339 - DNA, 21 bp, Homo sapiens
acggatatcctgcatgtccaa

SEQ ID NO: 340 - DNA, 21 bp, Homo sapiens
ccgggccaccgtgaactcaca

SEQ ID NO: 341 - DNA, 21 bp, Homo sapiens
aagacgtatgttggaacaaat

SEQ ID NO: 342 - DNA, 21 bp, Homo sapiens
caagacgtatgttggaacaaa

SEQ ID NO: 343 - DNA, 21 bp, Homo sapiens
aaggcttgcatttctattgga

SEQ ID NO: 344 - DNA, 21 bp, Homo sapiens
tagacctatgataaataacca

SEQ ID NO: 345 - DNA, 21 bp, Homo sapiens
acggaaagacttacgttatta

SEQ ID NO: 346 - DNA, 21 bp, Homo sapiens
cggaaagacttacgttattaa

SEQ ID NO: 347 - DNA, 21 bp, Homo sapiens
ccagagttcgcctacagataa

SEQ ID NO: 348 - DNA, 21 bp, Homo sapiens
ttgggatacagtaagagaata

SEQ ID NO: 349 - DNA, 21 bp, Homo sapiens
accggcatccaagcaagtgaa

SEQ ID NO: 350 - DNA, 21 bp, Homo sapiens
tccaagcaagtgaagatgtta

SEQ ID NO: 351 - DNA, 21 bp, Homo sapiens
cagatcttagtaagctatata

SEQ ID NO: 352 - DNA, 21 bp, Homo sapiens
tgggaaatagaagccagtgaa

SEQ ID NO: 353 - DNA, 21 bp, Homo sapiens
ccagatgaaggcgaccggcaa

SEQ ID NO: 354 - DNA, 21 bp, Homo sapiens
ctggaaagacatcgaggacta

SEQ ID NO: 355 - DNA, 21 bp, Homo sapiens
aaggtaattgctctaacttta

SEQ ID NO: 356 - DNA, 21 bp, Homo sapiens
accgagaagggttaaactata

SEQ ID NO: 357 - DNA, 21 bp, Homo sapiens
cccaacatcatcactctgaaa

SEQ ID NO: 358 - DNA, 21 bp, Homo sapiens
tgccacgtactccgcactcaa

SEQ ID NO: 359 - DNA, 21 bp, Homo sapiens
cggtcttgatgcagaacttta

SEQ ID NO: 360 - DNA, 21 bp, Homo sapiens
ctgatcggtcttgatgcagaa

SEQ ID NO: 361 - DNA, 21 bp, Homo sapiens
ctggacgtattcactcctgat

SEQ ID NO: 362 - DNA, 21 bp, Homo sapiens
tggaagcgtgttacttacaaa

SEQ ID NO: 363 - DNA, 21 bp, Homo sapiens
agggagaatggtgctgtttaa

SEQ ID NO: 364 - DNA, 21 bp, Homo sapiens
agggtgtatagtgttcacaaa

SEQ ID NO: 365 - DNA, 21 bp, Homo sapiens
cagactcttgtacacctataa

SEQ ID NO: 366 - DNA, 21 bp, Homo sapiens
taccatgtgatccgaaagtta

SEQ ID NO: 367 - DNA, 21 bp, Homo sapiens
cacaatcagtagcgtaaatat

SEQ ID NO: 368 - DNA, 21 bp, Homo sapiens
cagacatatataatgggtgaa

SEQ ID NO: 369 - DNA, 21 bp, Homo sapiens
aagatagacgcttcatgttaa

SEQ ID NO: 370 - DNA, 21 bp, Homo sapiens
aaggcaataatgctaattaca

SEQ ID NO: 371 - DNA, 21 bp, Homo sapiens
aagatgtaagatgctaattaa

SEQ ID NO: 372 - DNA, 21 bp, Homo sapiens
ccgggtgtacctgattctgga

SEQ ID NO: 373 - DNA, 21 bp, Homo sapiens
aagaagggtatcctttcatta

SEQ ID NO: 374 - DNA, 21 bp, Homo sapiens
cagagagtcaatgtcattaca

SEQ ID NO: 375 - DNA, 21 bp, Homo sapiens
cccgctcttaaagatgagtta

SEQ ID NO: 376 - DNA, 21 bp, Homo sapiens
tccggaatgcatcaactacta

SEQ ID NO: 377 - DNA, 21 bp, Homo sapiens
caagaatatatgaaagttcaa

SEQ ID NO: 378 - DNA, 21 bp, Homo sapiens
cccgtgtgaaccatcctaata

SEQ ID NO: 379 - DNA, 21 bp, Homo sapiens
cagtacaaagtcgcaatcaaa

SEQ ID NO: 380 - DNA, 21 bp, Homo sapiens
ccgcagctaatcagaatcaga

SEQ ID NO: 381 - DNA, 21 bp, Homo sapiens
ctccaatatcctcgtgaagaa

SEQ ID NO: 382 - DNA, 21 bp, Homo sapiens
tcggttaataacgacatgata

SEQ ID NO: 383 - DNA, 21 bp, Homo sapiens
cgggccgatgttctcaggaaa

SEQ ID NO: 384 - DNA, 21 bp, Homo sapiens
tcggctctgctacttcaagaa

SEQ ID NO: 385 - DNA, 21 bp, Homo sapiens
cagcaataccttggatgatta

SEQ ID NO: 386 - DNA, 21 bp, Homo sapiens
tccgactttatgattatgaaa

SEQ ID NO: 387 - DNA, 21 bp, Homo sapiens
cagctgggtttagctacgaaa

SEQ ID NO: 388 - DNA, 21 bp, Homo sapiens
cccggtgacattctatttcca

SEQ ID NO: 389 - DNA, 21 bp, Homo sapiens
caccatctggtaataaactca

SEQ ID NO: 390 - DNA, 21 bp, Homo sapiens
ctgatgctatatttccgcata

SEQ ID NO: 391 - DNA, 21 bp, Homo sapiens
ccgaatcatgacagtcagcaa

SEQ ID NO: 392 - DNA, 21 bp, Homo sapiens
ctggatccagccattcctgaa

SEQ ID NO: 393 - DNA, 21 bp, Homo sapiens
caggttatactccttaagtta

SEQ ID NO: 394 - DNA, 21 bp, Homo sapiens
ccaggtgtacttggtagatta

SEQ ID NO: 395 - DNA, 21 bp, Homo sapiens
cagggtagattacctcggata

SEQ ID NO: 396 - DNA, 21 bp, Homo sapiens
ttgactaataatactggctaa

SEQ ID NO: 397 - DNA, 21 bp, Homo sapiens
agcgctgaacttgattgggaa

SEQ ID NO: 398 - DNA, 21 bp, Homo sapiens
cacgcagagatgacagtacaa

SEQ ID NO: 399 - DNA, 21 bp, Homo sapiens
atgatattagctagacataaa

SEQ ID NO: 400 - DNA, 21 bp, Homo sapiens
catgatattagctagacataa

SEQ ID NO: 401 - DNA, 21 bp, Homo sapiens
cagcctcttgatgtcaatcca

SEQ ID NO: 402 - DNA, 21 bp, Homo sapiens
ccctgccttgataatatgtta

SEQ ID NO: 403 - DNA, 21 bp, Homo sapiens
aaggctcaacgtataagcgaa

SEQ ID NO: 404 - DNA, 21 bp, Homo sapiens
caggcctacactctattcaaa

SEQ ID NO: 405 - DNA, 21 bp, Homo sapiens
cacgccatacgatacaaagaa

SEQ ID NO: 406 - DNA, 21 bp, Homo sapiens
ccgctttaagtttaaggagta

SEQ ID NO: 407 - DNA, 21 bp, Homo sapiens
cgcgcggtacctccagagcaa

SEQ ID NO: 408 - DNA, 21 bp, Homo sapiens
tgccctttgcgttatattgta

SEQ ID NO: 409 - DNA, 21 bp, Homo sapiens
cccaccgacgttggaaggaaa

SEQ ID NO: 410 - DNA, 21 bp, Homo sapiens
ctggagggagcacgaacctaa

SEQ ID NO: 411 - DNA, 21 bp, Homo sapiens
agccaataagcttaaagctaa

SEQ ID NO: 412 - DNA, 21 bp, Homo sapiens
tcgacagtacgtggccctaaa

SEQ ID NO: 413 - DNA, 21 bp, Homo sapiens
tagaagcggtattaaagtaat

SEQ ID NO: 414 - DNA, 21 bp, Homo sapiens
tgcacagagattattgtatta

SEQ ID NO: 415 - DNA, 21 bp, Homo sapiens
caccttcggcatcctaatatt

SEQ ID NO: 416 - DNA, 21 bp, Homo sapiens
cacgtgctctacctccattta

SEQ ID NO: 417 - DNA, 21 bp, Homo sapiens
cagactttccgtagcagctta

SEQ ID NO: 418 - DNA, 21 bp, Homo sapiens
cagataatagtcggaaacaaa

SEQ ID NO: 419 - DNA, 21 bp, Homo sapiens
gaggtggttctttacaggata

SEQ ID NO: 420 - DNA, 21 bp, Homo sapiens
tcgagctgttggataaagtaa

SEQ ID NO: 421 - DNA, 21 bp, Homo sapiens
agggaggcaataataagttaa

SEQ ID NO: 422 - DNA, 21 bp, Homo sapiens
gaggatatcaatcgagtacaa

SEQ ID NO: 423 - DNA, 21 bp, Homo sapiens
ctcctctagttcagagacata

SEQ ID NO: 424 - DNA, 21 bp, Homo sapiens
ttcggaaatgcctcacatata

SEQ ID NO: 425 - DNA, 21 bp, Homo sapiens
cagcggtttactatagacaaa

SEQ ID NO: 426 - DNA, 21 bp, Homo sapiens
gcggtttactatagacaaata

SEQ ID NO: 427 - DNA, 21 bp, Homo sapiens
caagaggaacgacttctgtaa

SEQ ID NO: 428 - DNA, 21 bp, Homo sapiens
ctggagcgagtcagcgacata

SEQ ID NO: 429 - DNA, 21 bp, Homo sapiens
atcgatggaaagttcaagtaa

SEQ ID NO: 430 - DNA, 21 bp, Homo sapiens
ctggaagtcgttggagtatat

SEQ ID NO: 431 - DNA, 21 bp, Homo sapiens
cagcagattctcttctatgaa

SEQ ID NO: 432 - DNA, 21 bp, Homo sapiens
ccgcctcgtgaccaagtttaa

SEQ ID NO: 433 - DNA, 21 bp, Homo sapiens
caggtgctggatgctgtgaaa

SEQ ID NO: 434 - DNA, 21 bp, Homo sapiens
ctgcatgacctgggcattgta

SEQ ID NO: 435 - DNA, 21 bp, Homo sapiens
accgacctttctgattagtaa

SEQ ID NO: 436 - DNA, 21 bp, Homo sapiens
ccgacctttctgattagtaaa

SEQ ID NO: 437 - DNA, 21 bp, Homo sapiens
ccgtctgaagtgtattcgtaa

SEQ ID NO: 438 - DNA, 21 bp, Homo sapiens
ctgatgctgagcgaagctata

SEQ ID NO: 439 - DNA, 21 bp, Homo sapiens
cacaggttatacgagggacaa

SEQ ID NO: 440 - DNA, 21 bp, Homo sapiens
gaggctgaacaacatgaataa

SEQ ID NO: 441 - DNA, 21 bp, Homo sapiens
cagacccactactatagtaaa

SEQ ID NO: 442 - DNA, 21 bp, Homo sapiens
caggagggcgttagtggatca

SEQ ID NO: 443 - DNA, 21 bp, Homo sapiens
ccagcaaagatgataccttaa

SEQ ID NO: 444 - DNA, 21 bp, Homo sapiens
tagatagtgctctgtgcctaa

SEQ ID NO: 445 - DNA, 21 bp, Homo sapiens
aaccaatgggaatcactttaa

SEQ ID NO: 446 - DNA, 21 bp, Homo sapiens
aaggacgacagatctatgtaa

SEQ ID NO: 447 - DNA, 21 bp, Homo sapiens
atgattgattgttaaatttca

SEQ ID NO: 448 - DNA, 21 bp, Homo sapiens
taagtatgattgattgttaaa

SEQ ID NO: 449 - DNA, 21 bp, Homo sapiens
cacatagtgttctgactccaa

SEQ ID NO: 450 - DNA, 21 bp, Homo sapiens
caggagaatgtgtaacaagaa

SEQ ID NO: 451 - DNA, 21 bp, Homo sapiens
aacgacgtagtttcattggaa

SEQ ID NO: 452 - DNA, 21 bp, Homo sapiens
tcagagtattatcaatatgaa

SEQ ID NO: 453 - DNA, 21 bp, Homo sapiens
ccgacatttcctggcattgaa

SEQ ID NO: 454 - DNA, 21 bp, Homo sapiens
taccactagtctgacggataa

SEQ ID NO: 455 - DNA, 21 bp, Homo sapiens
acgtatgatctctctaataga

SEQ ID NO: 456 - DNA, 21 bp, Homo sapiens
cacaaggacatcgacctgtta

SEQ ID NO: 457 - DNA, 21 bp, Homo sapiens
atgcggcagttatatcatgaa

SEQ ID NO: 458 - DNA, 21 bp, Homo sapiens
ctggctgtattagtacaggaa

SEQ ID NO: 459 - DNA, 21 bp, Homo sapiens
ctccatatgaacaaagtgaaa

SEQ ID NO: 460 - DNA, 21 bp, Homo sapiens
ctgcatcacggcggagttgta

SEQ ID NO: 461 - DNA, 21 bp, Homo sapiens
ccggaaggccacgctgtttga

SEQ ID NO: 462 - DNA, 21 bp, Homo sapiens
tgagctggtttgactcattaa

SEQ ID NO: 463 - DNA, 21 bp, Homo sapiens
gtcggtgaacacattctcaaa

SEQ ID NO: 464 - DNA, 21 bp, Homo sapiens
tacagtgtctatgccgatcaa

SEQ ID NO: 465 - DNA, 21 bp, Homo sapiens
cagcaagaaggtgacacccaa

SEQ ID NO: 466 - DNA, 21 bp, Homo sapiens
ccgcgagaaccttctccgcaa

SEQ ID NO: 467 - DNA, 21 bp, Homo sapiens
caggctgtgcctttgacttta

SEQ ID NO: 468 - DNA, 21 bp, Homo sapiens
cgccaccttcatggcattcaa

SEQ ID NO: 469 - DNA, 21 bp, Homo sapiens
atgatgtgtttaggtaatcta

SEQ ID NO: 470 - DNA, 21 bp, Homo sapiens
ttctacggactttaaattaaa

SEQ ID NO: 471 - DNA, 21 bp, Homo sapiens
accgcagagaaccggaagaaa

SEQ ID NO: 472 - DNA, 21 bp, Homo sapiens
cgggctgagcggaacattcta

SEQ ID NO: 473 - DNA, 21 bp, Homo sapiens
cacatgcatgtgactcctcaa

SEQ ID NO: 474 - DNA, 21 bp, Homo sapiens
tacctagtgcatgctctgcaa

SEQ ID NO: 475 - DNA, 21 bp, Homo sapiens
cccgactgccagagtctgcta

SEQ ID NO: 476 - DNA, 21 bp, Homo sapiens
gcgagctactgtaaactttaa

SEQ ID NO: 477 - DNA, 21 bp, Homo sapiens
aaggatctagtctgcccacta

SEQ ID NO: 478 - DNA, 21 bp, Homo sapiens
atcggtcatgatgaacttgga

SEQ ID NO: 479 - DNA, 21 bp, Homo sapiens
aaagcgttggatgtagcatta

SEQ ID NO: 480 - DNA, 21 bp, Homo sapiens
accgacgattcttctactcaa

SEQ ID NO: 481 - DNA, 21 bp, Homo sapiens
aaagccggtatcagaaccata

SEQ ID NO: 482 - DNA, 21 bp, Homo sapiens
aacgtgatgaacgcaccttaa

SEQ ID NO: 483 - DNA, 21 bp, Homo sapiens
cagaaagactgtgcactacaa

SEQ ID NO: 484 - DNA, 21 bp, Homo sapiens
ctgcatcaagcaggttcacta

SEQ ID NO: 485 - DNA, 21 bp, Homo sapiens
ccggcttgagtgaattgtgta

SEQ ID NO: 486 - DNA, 21 bp, Homo sapiens
tacgttgatttcagagaatat

SEQ ID NO: 487 - DNA, 21 bp, Homo sapiens
aacggcatgtctctccaacaa

SEQ ID NO: 488 - DNA, 21 bp, Homo sapiens
aacttgaaagtcagcactaaa

SEQ ID NO: 489 - DNA, 21 bp, Homo sapiens
ctggaccgagtgactactata

SEQ ID NO: 490 - DNA, 21 bp, Homo sapiens
tcgggaaatccgaatgctcaa

SEQ ID NO: 491 - DNA, 21 bp, Homo sapiens
cccggagacctttggagttaa

SEQ ID NO: 492 - DNA, 21 bp, Homo sapiens
ctgttattactctgtcttgaa

SEQ ID NO: 493 - DNA, 21 bp, Homo sapiens
aacgcggcacttcacaattga

SEQ ID NO: 494 - DNA, 21 bp, Homo sapiens
acgcggcacttcacaattgat

SEQ ID NO: 495 - DNA, 21 bp, Homo sapiens
agcatatatgttgttaactca

SEQ ID NO: 496 - DNA, 21 bp, Homo sapiens
catgttaatgaaataattcaa

SEQ ID NO: 497 - DNA, 21 bp, Homo sapiens
aagcatgtggatgtacatcta

SEQ ID NO: 498 - DNA, 21 bp, Homo sapiens
cacgtttgtcactgccgttta

SEQ ID NO: 499 - DNA, 21 bp, Homo sapiens
ccgttcttacgtcgccataaa

SEQ ID NO: 500 - DNA, 21 bp, Homo sapiens
ctgtgattacctctcaatcta

SEQ ID NO: 501 - DNA, 21 bp, Homo sapiens
cacctacgtatttaagatgaa

SEQ ID NO: 502 - DNA, 21 bp, Homo sapiens
ctgggcctgtataccggataa

SEQ ID NO: 503 - DNA, 21 bp, Homo sapiens
acggcagtccatgacggtgaa

SEQ ID NO: 504 - DNA, 21 bp, Homo sapiens
cagcattccgctgaccatcaa

SEQ ID NO: 505 - DNA, 21 bp, Homo sapiens
cagctacgccggacaatagaa

SEQ ID NO: 506 - DNA, 21 bp, Homo sapiens
gcggcagacattaaaggtaca

SEQ ID NO: 507 - DNA, 21 bp, Homo sapiens
acacgacatgtgaatatccta

SEQ ID NO: 508 - DNA, 21 bp, Homo sapiens
ttgcttatatgttaaattgaa

SEQ ID NO: 509 - DNA, 21 bp, Homo sapiens
cagcttgtgataaagagtcaa

SEQ ID NO: 510 - DNA, 21 bp, Homo sapiens
tggcacttacatgaaagtgaa

SEQ ID NO: 511 - DNA, 21 bp, Homo sapiens
ccggtacagaatgtattgcca

SEQ ID NO: 512 - DNA, 21 bp, Homo sapiens
tacgcgcctcattaaaccaaa

SEQ ID NO: 513 - DNA, 21 bp, Homo sapiens
caacatatcttcgttatgtaa

SEQ ID NO: 514 - DNA, 21 bp, Homo sapiens
taccgcaaacttgatatggaa

SEQ ID NO: 515 - DNA, 21 bp, Homo sapiens
aaccagaacttcgccagtcaa

SEQ ID NO: 516 - DNA, 21 bp, Homo sapiens
gagcctgagggctaaatttaa

SEQ ID NO: 517 - DNA, 21 bp, Homo sapiens
cagcgccaagtaaacagggta

SEQ ID NO: 518 - DNA, 21 bp, Homo sapiens
tcggacagacatataggatat

SEQ ID NO: 519 - DNA, 21 bp, Homo sapiens
cccgcgaatgaagttacctta

SEQ ID NO: 520 - DNA, 21 bp, Homo sapiens
ccgccaggacatttcctataa

SEQ ID NO: 521 - DNA, 21 bp, Homo sapiens
accagttggatctccaatgaa

SEQ ID NO: 522 - DNA, 21 bp, Homo sapiens
cccggcagtatgtgtctgtaa

SEQ ID NO: 523 - DNA, 21 bp, Homo sapiens
accagtcatgatagtaataga

SEQ ID NO: 524 - DNA, 21 bp, Homo sapiens
caggctgcgaaggaagtacta

SEQ ID NO: 525 - DNA, 21 bp, Homo sapiens
atggccctggattatctacta

SEQ ID NO: 526 - DNA, 21 bp, Homo sapiens
gcgggatgatgtgacctacaa

SEQ ID NO: 527 - DNA, 21 bp, Homo sapiens
ccgcagctgaccgccagatta

SEQ ID NO: 528 - DNA, 21 bp, Homo sapiens
gcgggtctacgtggagctcaa

SEQ ID NO: 529 - DNA, 21 bp, Homo sapiens
cccagccaatagccactctaa

SEQ ID NO: 530 - DNA, 21 bp, Homo sapiens
tcggacaaacacggacagtat

SEQ ID NO: 531 - DNA, 21 bp, Homo sapiens
aaccgccaatctctagatcaa

SEQ ID NO: 532 - DNA, 21 bp, Homo sapiens
ctggagctttgggatactcat

SEQ ID NO: 533 - DNA, 21 bp, Homo sapiens
aacaaagaaatcttagacgaa

SEQ ID NO: 534 - DNA, 21 bp, Homo sapiens
cacgtttgagtccatgcccaa

SEQ ID NO: 535 - DNA, 21 bp, Homo sapiens
aaggaagagcagggacttcaa

SEQ ID NO: 536 - DNA, 21 bp, Homo sapiens
tagccgtagtgtaatgattga

SEQ ID NO: 537 - DNA, 21 bp, Homo sapiens
ccggtttgggaaagtctacaa

SEQ ID NO: 538 - DNA, 21 bp, Homo sapiens
ctggtgctttacgcagaataa

SEQ ID NO: 539 - DNA, 21 bp, Homo sapiens
cagggacttgtcgctgatcaa

SEQ ID NO: 540 - DNA, 21 bp, Homo sapiens
ctccaatatcatggaagttaa

SEQ ID NO: 541 - DNA, 21 bp, Homo sapiens
acggagagcgaccatctttaa

SEQ ID NO: 542 - DNA, 21 bp, Homo sapiens
cagaaagtgtctggacttgta

SEQ ID NO: 543 - DNA, 21 bp, Homo sapiens
ccagatcaagaaattcgtaaa

SEQ ID NO: 544 - DNA, 21 bp, Homo sapiens
cccgtagaaatgataactcca

SEQ ID NO: 545 - DNA, 21 bp, Homo sapiens
ctggctctactgcgtgaacaa

SEQ ID NO: 546 - DNA, 21 bp, Homo sapiens
tcggtcagcctcagaattcca

SEQ ID NO: 547 - DNA, 21 bp, Homo sapiens
agcgctgagaatggacagcaa

SEQ ID NO: 548 - DNA, 21 bp, Homo sapiens
tccaaacattatcactctaaa

SEQ ID NO: 549 - DNA, 21 bp, Homo sapiens
tccattggtggaattcatgaa

SEQ ID NO: 550 - DNA, 21 bp, Homo sapiens
tgggattgtactataccagta

SEQ ID NO: 551 - DNA, 21 bp, Homo sapiens
atgccagaagtggactatgta

SEQ ID NO: 552 - DNA, 21 bp, Homo sapiens
cgggatcgaatattaactcca

SEQ ID NO: 553 - DNA, 21 bp, Homo sapiens
caggctttcactgagagagaa

SEQ ID NO: 554 - DNA, 21 bp, Homo sapiens
ccagatagtaataaacaccat

SEQ ID NO: 555 - DNA, 21 bp, Homo sapiens
caccatccaaatgctgttgaa

SEQ ID NO: 556 - DNA, 21 bp, Homo sapiens
tcagaggagctgagtaatgaa

SEQ ID NO: 557 - DNA, 21 bp, Homo sapiens
cccatgaatcctcctaatcaa

SEQ ID NO: 558 - DNA, 21 bp, Homo sapiens
cgcgatctagtatatgtttaa

SEQ ID NO: 559 - DNA, 21 bp, Homo sapiens
aaggtgtatgtagaccactta

SEQ ID NO: 560 - DNA, 21 bp, Homo sapiens
ctggacagttacaagaaatta

SEQ ID NO: 561 - DNA, 21 bp, Homo sapiens
ccggaacgagcccaagtacaa

SEQ ID NO: 562 - DNA, 21 bp, Homo sapiens
gcacgtctttccagaattcaa

SEQ ID NO: 563 - DNA, 21 bp, Homo sapiens
cacggagatgaagtactatat

SEQ ID NO: 564 - DNA, 21 bp, Homo sapiens
ccggacctaccgctacagcaa

SEQ ID NO: 565 - DNA, 21 bp, Homo sapiens
cagactcaatatgcacggaca

SEQ ID NO: 566 - DNA, 21 bp, Homo sapiens
gcgaataatttatacatggaa

SEQ ID NO: 567 - DNA, 21 bp, Homo sapiens
caggtttataacttcgacaca

SEQ ID NO: 568 - DNA, 21 bp, Homo sapiens
ccggaagtgataacacgcaaa

SEQ ID NO: 569 - DNA, 21 bp, Homo sapiens
cgccatcatcgatgactacaa

SEQ ID NO: 570 - DNA, 21 bp, Homo sapiens
ctacgagcagatcaagataaa

SEQ ID NO: 571 - DNA, 21 bp, Homo sapiens
aaccaggatatttaacaggta

SEQ ID NO: 572 - DNA, 21 bp, Homo sapiens
tccattgtaaccgaagagtta

SEQ ID NO: 573 - DNA, 21 bp, Homo sapiens
cacgcccaaagctcagcacaa

SEQ ID NO: 574 - DNA, 21 bp, Homo sapiens
gcccaagagcctcaaatctaa

SEQ ID NO: 575 - DNA, 21 bp, Homo sapiens
aggcaagatcctacccggaaa

SEQ ID NO: 576 - DNA, 21 bp, Homo sapiens
tcggagctgcaccgagggcaa

SEQ ID NO: 577 - DNA, 21 bp, Homo sapiens
cacaaactgtataacggttta

SEQ ID NO: 578 - DNA, 21 bp, Homo sapiens
cggcaggtcattagtaattat

SEQ ID NO: 579 - DNA, 21 bp, Homo sapiens
aacgatgggtctgaagtccaa

SEQ ID NO: 580 - DNA, 21 bp, Homo sapiens
cccgatgacgctgaactagta

SEQ ID NO: 581 - DNA, 21 bp, Homo sapiens
aagctacatatggagcttaaa

SEQ ID NO: 582 - DNA, 21 bp, Homo sapiens
atgcacttgtataaagccata

SEQ ID NO: 583 - DNA, 21 bp, Homo sapiens
agggctttcatcaagaaatta

SEQ ID NO: 584 - DNA, 21 bp, Homo sapiens
atcaggttgatctttaaataa

SEQ ID NO: 585 - DNA, 21 bp, Homo sapiens
ctgcttacttatgccatagaa

SEQ ID NO: 586 - DNA, 21 bp, Homo sapiens
gagagcaattgtaacggttaa

SEQ ID NO: 587 - DNA, 21 bp, Homo sapiens
aagcatgtaatgttaatgtta

SEQ ID NO: 588 - DNA, 21 bp, Homo sapiens
cggctattactctgtggccaa

SEQ ID NO: 589 - DNA, 21 bp, Homo sapiens
cacctctaattcttactctaa

SEQ ID NO: 590 - DNA, 21 bp, Homo sapiens
ccacctctaattcttactcta

SEQ ID NO: 591 - DNA, 21 bp, Homo sapiens
agccatcatacgagatcttaa

SEQ ID NO: 592 - DNA, 21 bp, Homo sapiens
ctgccttacgatgacagaaat

SEQ ID NO: 593 - DNA, 21 bp, Homo sapiens
accaactacctccgtcagcaa

SEQ ID NO: 594 - DNA, 21 bp, Homo sapiens
cagcacatgggtggtacacta

SEQ ID NO: 595 - DNA, 21 bp, Homo sapiens
cccagtgagtaatctcagtaa

SEQ ID NO: 596 - DNA, 21 bp, Homo sapiens
ccgtactgcgatgaaacttca

SEQ ID NO: 597 - DNA, 21 bp, Homo sapiens
ccggtcacgcatgaaggcaaa

SEQ ID NO: 598 - DNA, 21 bp, Homo sapiens
cgccgtgatcgagaaagccaa

SEQ ID NO: 599 - DNA, 21 bp, Homo sapiens
ccgcgagtatgaccagcttta

SEQ ID NO: 600 - DNA, 21 bp, Homo sapiens
ttggtacgtgggcaagatcaa

SEQ ID NO: 601 - DNA, 21 bp, Homo sapiens
atggaattaagtgccatgaaa

SEQ ID NO: 602 - DNA, 21 bp, Homo sapiens
ctgcccgatggtcttccgtaa

SEQ ID NO: 603 - DNA, 21 bp, Homo sapiens
ccggatcaagaagaatgaata

SEQ ID NO: 604 - DNA, 21 bp, Homo sapiens
cgcgggcaagattgtgcctaa

SEQ ID NO: 605 - DNA, 21 bp, Homo sapiens
cggatgggattcacttaagaa

SEQ ID NO: 606 - DNA, 21 bp, Homo sapiens
ttggaatactctaagagaata

SEQ ID NO: 607 - DNA, 21 bp, Homo sapiens
acggatgtagtgttgaaagta

SEQ ID NO: 608 - DNA, 21 bp, Homo sapiens
cccgaaataatcgaacagatt

SEQ ID NO: 609 - DNA, 21 bp, Homo sapiens
ctgaaattattggacgtcata

SEQ ID NO: 610 - DNA, 21 bp, Homo sapiens
tcaggactccagctaaatcaa

SEQ ID NO: 611 - DNA, 21 bp, Homo sapiens
ctggagtagggactaactata

SEQ ID NO: 612 - DNA, 21 bp, Homo sapiens
tagggactaactatagcacaa

SEQ ID NO: 613 - DNA, 21 bp, Homo sapiens
acgcacggacatcaccatgaa

SEQ ID NO: 614 - DNA, 21 bp, Homo sapiens
ccagtggagataacactctaa

SEQ ID NO: 615 - DNA, 21 bp, Homo sapiens
atcaagcatcctaatctggta

SEQ ID NO: 616 - DNA, 21 bp, Homo sapiens
cccaagtgtaataagcctaca

SEQ ID NO: 617 - DNA, 21 bp, Homo sapiens
aagatgttcagtgttgggtaa

SEQ ID NO: 618 - DNA, 21 bp, Homo sapiens
caagtgtatgggattaactaa

SEQ ID NO: 619 - DNA, 21 bp, Homo sapiens
acgctacttcctcctcaagaa

SEQ ID NO: 620 - DNA, 21 bp, Homo sapiens
cacgcttggtcccgaggccaa

SEQ ID NO: 621 - DNA, 21 bp, Homo sapiens
caccaattgattgactgagaa

SEQ ID NO: 622 - DNA, 21 bp, Homo sapiens
ccgcagagctgcgtcacgtaa

SEQ ID NO: 623 - DNA, 21 bp, Homo sapiens
aagaaagtgatccatcatgat

SEQ ID NO: 624 - DNA, 21 bp, Homo sapiens
agagattgatttattaattaa

SEQ ID NO: 625 - DNA, 21 bp, Homo sapiens
cccatccaatttatcaaggaa

SEQ ID NO: 626 - DNA, 21 bp, Homo sapiens
cccgtcgctatcaaggaatta

SEQ ID NO: 627 - DNA, 21 bp, Homo sapiens
cagatgggatcccgtatcgaa

SEQ ID NO: 628 - DNA, 21 bp, Homo sapiens
tacctcagtaatcacaattat

SEQ ID NO: 629 - DNA, 21 bp, Homo sapiens
tcggatatgattgtttctcaa

SEQ ID NO: 630 - DNA, 21 bp, Homo sapiens
ttggatagtttcctacgtaaa

SEQ ID NO: 631 - DNA, 21 bp, Homo sapiens
ctacgtgttagtggctcttaa

SEQ ID NO: 632 - DNA, 21 bp, Homo sapiens
tcgggatttggcagcccgtaa

SEQ ID NO: 633 - DNA, 21 bp, Homo sapiens
cagaacaacttagtaggataa

SEQ ID NO: 634 - DNA, 21 bp, Homo sapiens
cagatagatcctagtacagaa

SEQ ID NO: 635 - DNA, 21 bp, Homo sapiens
cacgtggaacggcagcactaa

SEQ ID NO: 636 - DNA, 21 bp, Homo sapiens
cagaccttgtctagttattta

SEQ ID NO: 637 - DNA, 21 bp, Homo sapiens
acgcgtgtgacattcaagaaa

SEQ ID NO: 638 - DNA, 21 bp, Homo sapiens
cccgtggttgtctgtacagaa

SEQ ID NO: 639 - DNA, 21 bp, Homo sapiens
agcgtcataactagaactgaa

SEQ ID NO: 640 - DNA, 21 bp, Homo sapiens
caggaacaacgcggtaggcaa

SEQ ID NO: 641 - DNA, 21 bp, Homo sapiens
aagggccaggactttatctaa

SEQ ID NO: 642 - DNA, 21 bp, Homo sapiens
cgccattacaccaatgcttca

SEQ ID NO: 643 - DNA, 21 bp, Homo sapiens
cgcgaacatcttgatcagtga

SEQ ID NO: 644 - DNA, 21 bp, Homo sapiens
ctcggtgtacaaggcgactta

SEQ ID NO: 645 - DNA, 21 bp, Homo sapiens
aacgttgtaggttgaaactga

SEQ ID NO: 646 - DNA, 21 bp, Homo sapiens
ttcattagcactaacatccaa

SEQ ID NO: 647 - DNA, 21 bp, Homo sapiens
acccaaagtactactcattta

SEQ ID NO: 648 - DNA, 21 bp, Homo sapiens
tccaatattagttggagttaa

SEQ ID NO: 649 - DNA, 21 bp, Homo sapiens
cacggaaacacccgtacctta

SEQ ID NO: 650 - DNA, 21 bp, Homo sapiens
cccgaccatggtagtgttcaa

SEQ ID NO: 651 - DNA, 21 bp, Homo sapiens
aacggttagaacaagaggtaa

SEQ ID NO: 652 - DNA, 21 bp, Homo sapiens
caagctcgaattacatcttta

SEQ ID NO: 653 - DNA, 21 bp, Homo sapiens
aagcagtgcctgcctatgaaa

SEQ ID NO: 654 - DNA, 21 bp, Homo sapiens
cggcttgtgggtgatgtttga

SEQ ID NO: 655 - DNA, 21 bp, Homo sapiens
cccagtgagaacgtgacgtta

SEQ ID NO: 656 - DNA, 21 bp, Homo sapiens
gcgcttcaaggtcaatgtgaa

SEQ ID NO: 657 - DNA, 21 bp, Homo sapiens
ccagcctacattcacttctaa

SEQ ID NO: 658 - DNA, 21 bp, Homo sapiens
gaggctcctgcttatttataa

SEQ ID NO: 659 - DNA, 21 bp, Homo sapiens
ctggaggagtttgaggatgaa

SEQ ID NO: 660 - DNA, 21 bp, Homo sapiens
tggcatcagcttacagtgcaa

SEQ ID NO: 661 - DNA, 21 bp, Homo sapiens
atggaaatacatatcgaatga

SEQ ID NO: 662 - DNA, 21 bp, Homo sapiens
cccgatcatgtttggcattaa

SEQ ID NO: 663 - DNA, 21 bp, Homo sapiens
caggactttagtagagactga

SEQ ID NO: 664 - DNA, 21 bp, Homo sapiens
ctggtgagttaagtaagatta

SEQ ID NO: 665 - DNA, 21 bp, Homo sapiens
caggaggaatctgttactcga

SEQ ID NO: 666 - DNA, 21 bp, Homo sapiens
cagggtgaacctgcctgtgaa

SEQ ID NO: 667 - DNA, 21 bp, Homo sapiens
acggcctggaatgaactgaaa

SEQ ID NO: 668 - DNA, 21 bp, Homo sapiens
cccaccaatgacgtcctcaaa

SEQ ID NO: 669 - DNA, 21 bp, Homo sapiens
cacctgggtactggtatggaa

SEQ ID NO: 670 - DNA, 21 bp, Homo sapiens
ccggtcgaatgataaggtgta

SEQ ID NO: 671 - DNA, 21 bp, Homo sapiens
cacagctgaaatgtacgacaa

SEQ ID NO: 672 - DNA, 21 bp, Homo sapiens
ctgggctgtgatgacgaatat

SEQ ID NO: 673 - DNA, 21 bp, Homo sapiens
cacgtttggccaggtagttaa

SEQ ID NO: 674 - DNA, 21 bp, Homo sapiens
ctcattctggttggagattaa

SEQ ID NO: 675 - DNA, 21 bp, Homo sapiens
cagcctatcagtgaacatcaa

SEQ ID NO: 676 - DNA, 21 bp, Homo sapiens
cagcttcaaagggatatacaa

SEQ ID NO: 677 - DNA, 21 bp, Homo sapiens
acgcaagtcgtggatgagtaa

SEQ ID NO: 678 - DNA, 21 bp, Homo sapiens
cggcagtcagatcctgcataa

SEQ ID NO: 679 - DNA, 21 bp, Homo sapiens
cagacttctcctagacatcta

SEQ ID NO: 680 - DNA, 21 bp, Homo sapiens
caggatctagccttctatcta

SEQ ID NO: 681 - DNA, 21 bp, Homo sapiens
cacgatatgtcagtactgcaa

SEQ ID NO: 682 - DNA, 21 bp, Homo sapiens
cgggagagtgttaccattgaa

SEQ ID NO: 683 - DNA, 21 bp, Homo sapiens
caaggttagcacgcaacagaa

SEQ ID NO: 684 - DNA, 21 bp, Homo sapiens
gaggccggtagtgatcctcaa

SEQ ID NO: 685 - DNA, 21 bp, Homo sapiens
aacacctatttcttaactcaa

SEQ ID NO: 686 - DNA, 21 bp, Homo sapiens
cagctggaataacaagcccaa

SEQ ID NO: 687 - DNA, 21 bp, Homo sapiens
aacgcccaccatgatgctcta

SEQ ID NO: 688 - DNA, 21 bp, Homo sapiens
cagaacttggagagcagggaa

SEQ ID NO: 689 - DNA, 21 bp, Homo sapiens
cggcgccgagccgatgagtaa

SEQ ID NO: 690 - DNA, 21 bp, Homo sapiens
ctggacaacttcatcaagatt

SEQ ID NO: 691 - DNA, 21 bp, Homo sapiens
cacagtgttgatatatgggta

SEQ ID NO: 692 - DNA, 21 bp, Homo sapiens
ccggatataatcgatcaggtt

SEQ ID NO: 693 - DNA, 21 bp, Homo sapiens
caccaatccctgaaagattaa

SEQ ID NO: 694 - DNA, 21 bp, Homo sapiens
ctcaagcatcgcatagtttaa

SEQ ID NO: 695 - DNA, 21 bp, Homo sapiens
cagcgagtagataatatcgaa

SEQ ID NO: 696 - DNA, 21 bp, Homo sapiens
ccgggaatctatactcaatga

SEQ ID NO: 697 - DNA, 21 bp, Homo sapiens
aacctgaaatccgctagcaaa

SEQ ID NO: 698 - DNA, 21 bp, Homo sapiens
cagcatccatggctaatgaaa

SEQ ID NO: 699 - DNA, 21 bp, Homo sapiens
ccgggtccaggtggccattaa

SEQ ID NO: 700 - DNA, 21 bp, Homo sapiens
cgggttagccaggcttatcaa

SEQ ID NO: 701 - DNA, 21 bp, Homo sapiens
aagtgatagtgtcatgctaaa

SEQ ID NO: 702 - DNA, 21 bp, Homo sapiens
acccttcaactgttaaaggaa

SEQ ID NO: 703 - DNA, 21 bp, Homo sapiens
cacggaattagagaacctgga

SEQ ID NO: 704 - DNA, 21 bp, Homo sapiens
cagctcaaactgatgaagaaa

SEQ ID NO: 705 - DNA, 21 bp, Homo sapiens
cgccgagatattccatgtata

SEQ ID NO: 706 - DNA, 21 bp, Homo sapiens
taggaccttaagagaatagta

SEQ ID NO: 707 - DNA, 21 bp, Homo sapiens
caccttggacaagccacacaa

SEQ ID NO: 708 - DNA, 21 bp, Homo sapiens
ctgcaggtgagaggatttaaa

SEQ ID NO: 709 - DNA, 21 bp, Homo sapiens
aagccggacgacgacattcta

SEQ ID NO: 710 - DNA, 21 bp, Homo sapiens
tgggttggaatgtgaacaata

SEQ ID NO: 711 - DNA, 21 bp, Homo sapiens
accacgaacagaagtaatgaa

SEQ ID NO: 712 - DNA, 21 bp, Homo sapiens
ctgacgagtttgtctaggaaa

SEQ ID NO: 713 - DNA, 21 bp, Homo sapiens
acgcactgtcagttacaccaa

SEQ ID NO: 714 - DNA, 21 bp, Homo sapiens
ccggttcattccagtcaccga

SEQ ID NO: 715 - DNA, 21 bp, Homo sapiens
caccataatcgctgtatgaaa

SEQ ID NO: 716 - DNA, 21 bp, Homo sapiens
cacgccaacatcgttacgcta

SEQ ID NO: 717 - DNA, 21 bp, Homo sapiens
acgcaggaagcctactattta

SEQ ID NO: 718 - DNA, 21 bp, Homo sapiens
cgcaggaagcctactatttaa

SEQ ID NO: 719 - DNA, 21 bp, Homo sapiens
ccagagcaagatagtctacta

SEQ ID NO: 720 - DNA, 21 bp, Homo sapiens
ccgtgacaagccaactaacaa

SEQ ID NO: 721 - DNA, 21 bp, Homo sapiens
caagagcctgcaagcacttaa

SEQ ID NO: 722 - DNA, 21 bp, Homo sapiens
ccgggagatcgtcatccgaga

SEQ ID NO: 723 - DNA, 21 bp, Homo sapiens
ctgagtcagtataagtatata

SEQ ID NO: 724 - DNA, 21 bp, Homo sapiens
tgcgaaattctcacactatta

SEQ ID NO: 725 - DNA, 21 bp, Homo sapiens
cccttcgataagattattgaa

SEQ ID NO: 726 - DNA, 21 bp, Homo sapiens
tcgggaagctaccatttctta

SEQ ID NO: 727 - DNA, 21 bp, Homo sapiens
cccacgatattctgtacacaa

SEQ ID NO: 728 - DNA, 21 bp, Homo sapiens
tcgggatcagttagcaactat

SEQ ID NO: 729 - DNA, 21 bp, Homo sapiens
acgactaagcccaaatcttta

SEQ ID NO: 730 - DNA, 21 bp, Homo sapiens
ccgatttcggattatctaata

SEQ ID NO: 731 - DNA, 21 bp, Homo sapiens
cacgtctagaagtcacatgaa

SEQ ID NO: 732 - DNA, 21 bp, Homo sapiens
ctggctatggaactaaataca

SEQ ID NO: 733 - DNA, 21 bp, Homo sapiens
ccgcttcaaggttcacaacta

SEQ ID NO: 734 - DNA, 21 bp, Homo sapiens
ccgggacactatattccagaa

SEQ ID NO: 735 - DNA, 21 bp, Homo sapiens
cgccgtgtgctcatcactgaa

SEQ ID NO: 736 - DNA, 21 bp, Homo sapiens
gaccagatttgtggcttataa

SEQ ID NO: 737 - DNA, 21 bp, Homo sapiens
aaagtatgatatctacgcaaa

SEQ ID NO: 738 - DNA, 21 bp, Homo sapiens
cacgtcaaagtatgatatcta

SEQ ID NO: 739 - DNA, 21 bp, Homo sapiens
ccgcagacaagtaatcactaa

SEQ ID NO: 740 - DNA, 21 bp, Homo sapiens
cgggcagatgtatatccagaa

SEQ ID NO: 741 - DNA, 21 bp, Homo sapiens
ccggtgtatataccatacaaa

SEQ ID NO: 742 - DNA, 21 bp, Homo sapiens
gaggttcgtttgaagattcta

SEQ ID NO: 743 - DNA, 21 bp, Homo sapiens
gacctacaatttgattctcaa

SEQ ID NO: 744 - DNA, 21 bp, Homo sapiens
ttgagtactactaacgtttaa

SEQ ID NO: 745 - DNA, 21 bp, Homo sapiens
ccggcgcctaagagtaaacta

SEQ ID NO: 746 - DNA, 21 bp, Homo sapiens
cggcgcctaagagtaaactaa

SEQ ID NO: 747 - DNA, 21 bp, Homo sapiens
aggattcatagcatcactata

SEQ ID NO: 748 - DNA, 21 bp, Homo sapiens
caccatttgctgtgcgaatta

SEQ ID NO: 749 - DNA, 21 bp, Homo sapiens
caggaccgccctgacacacaa

SEQ ID NO: 750 - DNA, 21 bp, Homo sapiens
ctgcggtacctgcactccaaa

SEQ ID NO: 751 - DNA, 21 bp, Homo sapiens
aacggtgacctttagtgccaa

SEQ ID NO: 752 - DNA, 21 bp, Homo sapiens
cggactgaccaaatcacccaa

SEQ ID NO: 753 - DNA, 21 bp, Homo sapiens
cacacaataggttaatcgaaa

SEQ ID NO: 754 - DNA, 21 bp, Homo sapiens
ctggaggatttggattgatat

SEQ ID NO: 755 - DNA, 21 bp, Homo sapiens
cagggagcactatgaaaggaa

SEQ ID NO: 756 - DNA, 21 bp, Homo sapiens
ctcgtattccttgtacataga

SEQ ID NO: 757 - DNA, 21 bp, Homo sapiens
ccgccgctggtttgtgctcaa

SEQ ID NO: 758 - DNA, 21 bp, Homo sapiens
cggactcagcttagtgctgaa

SEQ ID NO: 759 - DNA, 21 bp, Homo sapiens
cagatgaatgttgttaaggaa

SEQ ID NO: 760 - DNA, 21 bp, Homo sapiens
ttgcctgacgttcggaaccaa

SEQ ID NO: 761 - DNA, 21 bp, Homo sapiens
aagggcatcgataaccacaca

SEQ ID NO: 762 - DNA, 21 bp, Homo sapiens
caccaagctatggatcatcat

SEQ ID NO: 763 - DNA, 21 bp, Homo sapiens
caccgaagagcagctagacaa

SEQ ID NO: 764 - DNA, 21 bp, Homo sapiens
ctgcaccttcttcaataagaa

SEQ ID NO: 765 - DNA, 21 bp, Homo sapiens
agggatcatgacctatgctaa

SEQ ID NO: 766 - DNA, 21 bp, Homo sapiens
atcaagctatccataatgaaa

SEQ ID NO: 767 - DNA, 21 bp, Homo sapiens
cagcagggaaacgaactccga

SEQ ID NO: 768 - DNA, 21 bp, Homo sapiens
tccgatgtgcgcccattgtaa

SEQ ID NO: 769 - DNA, 21 bp, Homo sapiens
ccgcaagatcttctctgggaa

SEQ ID NO: 770 - DNA, 21 bp, Homo sapiens
ctagctgattgttgtggtcaa

SEQ ID NO: 771 - DNA, 21 bp, Homo sapiens
cccagtgtggatactaataaa

SEQ ID NO: 772 - DNA, 21 bp, Homo sapiens
ttggctgtgcttgaaggcgaa

SEQ ID NO: 773 - DNA, 21 bp, Homo sapiens
cttgcctatttgcatactaaa

SEQ ID NO: 774 - DNA, 21 bp, Homo sapiens
tccgcttattaggatcagaca

SEQ ID NO: 775 - DNA, 21 bp, Homo sapiens
cacagtaatatgattgtccta

SEQ ID NO: 776 - DNA, 21 bp, Homo sapiens
cagaatgatgtccgagtcaaa

SEQ ID NO: 777 - DNA, 21 bp, Homo sapiens
cagatgctcctgagcaattta

SEQ ID NO: 778 - DNA, 21 bp, Homo sapiens
cagattgtgtctggactgaaa

SEQ ID NO: 779 - DNA, 21 bp, Homo sapiens
aacgttcatcgagcagatgaa

SEQ ID NO: 780 - DNA, 21 bp, Homo sapiens
acctataagtctagtagcaaa

SEQ ID NO: 781 - DNA, 21 bp, Homo sapiens
cagcagcaaggtggtacagaa

SEQ ID NO: 782 - DNA, 21 bp, Homo sapiens
ctggtggttcaggaaacgcaa

SEQ ID NO: 783 - DNA, 21 bp, Homo sapiens
cagtatcaagttgttgatgat

SEQ ID NO: 784 - DNA, 21 bp, Homo sapiens
catgaatctattgtcactaaa

SEQ ID NO: 785 - DNA, 21 bp, Homo sapiens
ccgcctgtttgggttaacaaa

SEQ ID NO: 786 - DNA, 21 bp, Homo sapiens
ctcggtgtttcaggcactaaa

SEQ ID NO: 787 - DNA, 21 bp, Homo sapiens
cccgattagggtcgagtgtca

SEQ ID NO: 788 - DNA, 21 bp, Homo sapiens
ccgctccacacgctccaataa

SEQ ID NO: 789 - DNA, 21 bp, Homo sapiens
cccaaagttagttactcttaa

SEQ ID NO: 790 - DNA, 21 bp, Homo sapiens
cgagttcaagtctgtatcaaa

SEQ ID NO: 791 - DNA, 21 bp, Homo sapiens
aaggttcatctgtccatgcaa

SEQ ID NO: 792 - DNA, 21 bp, Homo sapiens
caagagaatacgattcttaaa

SEQ ID NO: 793 - DNA, 21 bp, Homo sapiens
accgctcgttaacatatacaa

SEQ ID NO: 794 - DNA, 21 bp, Homo sapiens
cagcctgatgtcgtgcgtcaa

SEQ ID NO: 795 - DNA, 21 bp, Homo sapiens
ccgggattgtccaattactaa

SEQ ID NO: 796 - DNA, 21 bp, Homo sapiens
cgggattgtccaattactaaa

SEQ ID NO: 797 - DNA, 21 bp, Homo sapiens
cggcaacttacacacattgaa

SEQ ID NO: 798 - DNA, 21 bp, Homo sapiens
ctggttgtatcttattagcaa

SEQ ID NO: 799 - DNA, 21 bp, Homo sapiens
ctcgtgtattacagaaggaaa

SEQ ID NO: 800 - DNA, 21 bp, Homo sapiens
ttcggctaactcgccagttta

SEQ ID NO: 801 - DNA, 21 bp, Homo sapiens
agggtactttagagcaactta

SEQ ID NO: 802 - DNA, 21 bp, Homo sapiens
taggaaagactactcaagtta

SEQ ID NO: 803 - DNA, 21 bp, Homo sapiens
caggacatcaatcaagtctta

SEQ ID NO: 804 - DNA, 21 bp, Homo sapiens
cccattgagtatcaacggaaa

SEQ ID NO: 805 - DNA, 21 bp, Homo sapiens
accgttgttcttagatgtcga

SEQ ID NO: 806 - DNA, 21 bp, Homo sapiens
ccgggaatgtatggatacgta

SEQ ID NO: 807 - DNA, 21 bp, Homo sapiens
ccgggaagaatcgctatctga

SEQ ID NO: 808 - DNA, 21 bp, Homo sapiens
cgagatgagccctataatgaa

SEQ ID NO: 809 - DNA, 21 bp, Homo sapiens
atggaaggcactatttctcaa

SEQ ID NO: 810 - DNA, 21 bp, Homo sapiens
caggatataccgtaacacgaa

SEQ ID NO: 811 - DNA, 21 bp, Homo sapiens
ctgactaagagtcccaagaaa

SEQ ID NO: 812 - DNA, 21 bp, Homo sapiens
tacgtgggtgtactccatcaa

SEQ ID NO: 813 - DNA, 21 bp, Homo sapiens
acgccgtcctttgaataacaa

SEQ ID NO: 814 - DNA, 21 bp, Homo sapiens
aggactgtcttataaagatta

SEQ ID NO: 815 - DNA, 21 bp, Homo sapiens
cacattcgaatcggtatatta

SEQ ID NO: 816 - DNA, 21 bp, Homo sapiens
ctggatgttcgtcatattgaa

SEQ ID NO: 817 - DNA, 21 bp, Homo sapiens
cagataagcatagaactgata

SEQ ID NO: 818 - DNA, 21 bp, Homo sapiens
tagcaggacagccacacttaa

SEQ ID NO: 819 - DNA, 21 bp, Homo sapiens
cacccttaatgtcccgagcaa

SEQ ID NO: 820 - DNA, 21 bp, Homo sapiens
gaagctttacatagaacctta

SEQ ID NO: 821 - DNA, 21 bp, Homo sapiens
cacgtgaacagggacacgcta

SEQ ID NO: 822 - DNA, 21 bp, Homo sapiens
cacgtgtgagacagccctgaa

SEQ ID NO: 823 - DNA, 21 bp, Homo sapiens
aaccttatcgctcaacatgaa

SEQ ID NO: 824 - DNA, 21 bp, Homo sapiens
tacgtcggccataaacagcta

SEQ ID NO: 825 - DNA, 21 bp, Homo sapiens
aagacagagatcagtgtggaa

SEQ ID NO: 826 - DNA, 21 bp, Homo sapiens
ttgggatggttgaatgctgta

SEQ ID NO: 827 - DNA, 21 bp, Homo sapiens
atcagttggaattctcctaaa

SEQ ID NO: 828 - DNA, 21 bp, Homo sapiens
tcccggaaagatcaactgaaa

SEQ ID NO: 829 - DNA, 21 bp, Homo sapiens
cagagagtatagaatacacaa

SEQ ID NO: 830 - DNA, 21 bp, Homo sapiens
ccggagaagaaacaatcggaa

SEQ ID NO: 831 - DNA, 21 bp, Homo sapiens
acaggtaatgtcggcttccaa

SEQ ID NO: 832 - DNA, 21 bp, Homo sapiens
ctggaagaatttgacgacgaa

SEQ ID NO: 833 - DNA, 21 bp, Homo sapiens
aagggacacctttcacagcta

SEQ ID NO: 834 - DNA, 21 bp, Homo sapiens
ctgggtcttgtcaacatctaa

SEQ ID NO: 835 - DNA, 21 bp, Homo sapiens
ccgcgtcgtggtcatgaacaa

SEQ ID NO: 836 - DNA, 21 bp, Homo sapiens
cggcaagacctatttataata

SEQ ID NO: 837 - DNA, 21 bp, Homo sapiens
ccggtgtcaatggcaggtcaa

SEQ ID NO: 838 - DNA, 21 bp, Homo sapiens
tcgcctcaccatcaagaagta

SEQ ID NO: 839 - DNA, 21 bp, Homo sapiens
caggattggtttatatgatta

SEQ ID NO: 840 - DNA, 21 bp, Homo sapiens
ccgggttgtttcacgaagaaa

SEQ ID NO: 841 - DNA, 21 bp, Homo sapiens
ccggatgcctttgacaatgaa

SEQ ID NO: 842 - DNA, 21 bp, Homo sapiens
tcagtacattacgttcgtcaa

SEQ ID NO: 843 - DNA, 21 bp, Homo sapiens
tggaatagtctcagatctaaa

SEQ ID NO: 844 - DNA, 21 bp, Homo sapiens
ttggagtatttgtaacttcta

SEQ ID NO: 845 - DNA, 21 bp, Homo sapiens
cagaacgtagattagcttata

SEQ ID NO: 846 - DNA, 21 bp, Homo sapiens
ctgacttgacacgtttgtaaa

SEQ ID NO: 847 - DNA, 21 bp, Homo sapiens
accaactaacttacatgctta

SEQ ID NO: 848 - DNA, 21 bp, Homo sapiens
ccacagcgagaccctagttaa

SEQ ID NO: 849 - DNA, 21 bp, Homo sapiens
atgaaacatattgtctcttta

SEQ ID NO: 850 - DNA, 21 bp, Homo sapiens
caggtagtttattcaaagaga

SEQ ID NO: 851 - DNA, 21 bp, Homo sapiens
cagacactacatgaacacgaa

SEQ ID NO: 852 - DNA, 21 bp, Homo sapiens
cgggatggcgctcttcttcta

SEQ ID NO: 853 - DNA, 21 bp, Homo sapiens
agggaaatactacgccatcaa

SEQ ID NO: 854 - DNA, 21 bp, Homo sapiens
cccgggaagtttcaagtttga

SEQ ID NO: 855 - DNA, 21 bp, Homo sapiens
ccggttgacttctctgctaga

SEQ ID NO: 856 - DNA, 21 bp, Homo sapiens
tcggtggaggagggagtcaaa

SEQ ID NO: 857 - DNA, 21 bp, Homo sapiens
caggaagatgtggtcattcat

SEQ ID NO: 858 - DNA, 21 bp, Homo sapiens
cctggtaacagtgaaattgaa

SEQ ID NO: 859 - DNA, 21 bp, Homo sapiens
acggcggaacaaggagatcat

SEQ ID NO: 860 - DNA, 21 bp, Homo sapiens
ccgcatcatcgaacggctaaa

SEQ ID NO: 861 - DNA, 21 bp, Homo sapiens
atcgatgttgccagactacta

SEQ ID NO: 862 - DNA, 21 bp, Homo sapiens
caccatggtattacaggttca

SEQ ID NO: 863 - DNA, 21 bp, Homo sapiens
cagccttgacttatccgaatt

SEQ ID NO: 864 - DNA, 21 bp, Homo sapiens
gccgctgaggatgtcccgaaa

SEQ ID NO: 865 - DNA, 21 bp, Homo sapiens
cacgccgtcattgacatcaat

SEQ ID NO: 866 - DNA, 21 bp, Homo sapiens
ccgattaatgtctgtacgtca

SEQ ID NO: 867 - DNA, 21 bp, Homo sapiens
aaagaataagctgtcgttaaa

SEQ ID NO: 868 - DNA, 21 bp, Homo sapiens
ccggctgtgtgttctacgaga

SEQ ID NO: 869 - DNA, 21 bp, Homo sapiens
caccaaatggtcaaacaacta

SEQ ID NO: 870 - DNA, 21 bp, Homo sapiens
ctggtagtactagttcaccta

SEQ ID NO: 871 - DNA, 21 bp, Homo sapiens
accggtgctgctgcaactcta

SEQ ID NO: 872 - DNA, 21 bp, Homo sapiens
atcgcagatcaaagtggacaa

SEQ ID NO: 873 - DNA, 21 bp, Homo sapiens
cggaatttgttgctccagaaa

SEQ ID NO: 874 - DNA, 21 bp, Homo sapiens
ctggttaaagagacccggaaa

SEQ ID NO: 875 - DNA, 21 bp, Homo sapiens
ccgcatggtttggttaatgaa

SEQ ID NO: 876 - DNA, 21 bp, Homo sapiens
cgcatggtttggttaatgaaa

SEQ ID NO: 877 - DNA, 21 bp, Homo sapiens
aagatgaggcgcaaacggaaa

SEQ ID NO: 878 - DNA, 21 bp, Homo sapiens
aagcgctttgtggccctcaaa

SEQ ID NO: 879 - DNA, 21 bp, Homo sapiens
aaggaacactttaagtacgta

SEQ ID NO: 880 - DNA, 21 bp, Homo sapiens
caggataacaccaccaactat

SEQ ID NO: 881 - DNA, 21 bp, Homo sapiens
accacggaagtcgagaattaa

SEQ ID NO: 882 - DNA, 21 bp, Homo sapiens
accggagaggatccatgagaa

SEQ ID NO: 883 - DNA, 21 bp, Homo sapiens
cccgaatatgacgaatctgat

SEQ ID NO: 884 - DNA, 21 bp, Homo sapiens
ctgattaagggtgcaactaaa

SEQ ID NO: 885 - DNA, 21 bp, Homo sapiens
cagcggtatactgctgaacaa

SEQ ID NO: 886 - DNA, 21 bp, Homo sapiens
ggcgaggtaaatggtcttaaa

SEQ ID NO: 887 - DNA, 21 bp, Homo sapiens
cacactcacctcgcccaataa

SEQ ID NO: 888 - DNA, 21 bp, Homo sapiens
caggaccttcactgcattaaa

SEQ ID NO: 889 - DNA, 21 bp, Homo sapiens
cacgggcaaagtgccctgtaa

SEQ ID NO: 890 - DNA, 21 bp, Homo sapiens
tcggaccaagatcaaaccaaa

SEQ ID NO: 891 - DNA, 21 bp, Homo sapiens
aagcagaattctagatcagaa

SEQ ID NO: 892 - DNA, 21 bp, Homo sapiens
tagaggcagaagattacttaa

SEQ ID NO: 893 - DNA, 21 bp, Homo sapiens
accgggaagttatcagatcaa

SEQ ID NO: 894 - DNA, 21 bp, Homo sapiens
atcggtacagttattcttaaa

SEQ ID NO: 895 - DNA, 21 bp, Homo sapiens
ccagatcaggaccgtgataaa

SEQ ID NO: 896 - DNA, 21 bp, Homo sapiens
tagcatcttgtgatcacccaa

SEQ ID NO: 897 - DNA, 21 bp, Homo sapiens
aagcatcgtgcaataagtgaa

SEQ ID NO: 898 - DNA, 21 bp, Homo sapiens
ctgcctatggctgaaactata

SEQ ID NO: 899 - DNA, 21 bp, Homo sapiens
cgggttgtcttccgtcagata

SEQ ID NO: 900 - DNA, 21 bp, Homo sapiens
ctggatcatgcaagattacaa

SEQ ID NO: 901 - DNA, 21 bp, Homo sapiens
cttgagttgatgatcaattaa

SEQ ID NO: 902 - DNA, 21 bp, Homo sapiens
tagggatttactggcatggta

SEQ ID NO: 903 - DNA, 21 bp, Homo sapiens
aacgtgagtagcggtgatgta

SEQ ID NO: 904 - DNA, 21 bp, Homo sapiens
ccaggtggtaaacctgatgaa

SEQ ID NO: 905 - DNA, 21 bp, Homo sapiens
cacctccgacttaaatgtgaa

SEQ ID NO: 906 - DNA, 21 bp, Homo sapiens
cagatcagactaagtatagta

SEQ ID NO: 907 - DNA, 21 bp, Homo sapiens
acctaatgacttggtaaatta

SEQ ID NO: 908 - DNA, 21 bp, Homo sapiens
ctcagtaatctagcttatata

SEQ ID NO: 909 - DNA, 21 bp, Homo sapiens
agggagatgtactgtattata

SEQ ID NO: 910 - DNA, 21 bp, Homo sapiens
tacaaccatgataaccattat

SEQ ID NO: 911 - DNA, 21 bp, Homo sapiens
accgtatggcctatagtttaa

SEQ ID NO: 912 - DNA, 21 bp, Homo sapiens
agggagtatactagtaggtta

SEQ ID NO: 913 - DNA, 21 bp, Homo sapiens
cactgtcgtcaggaagatata

SEQ ID NO: 914 - DNA, 21 bp, Homo sapiens
gaggatttgtttgagtacgaa

SEQ ID NO: 915 - DNA, 21 bp, Homo sapiens
cagtcaatagccagaccttaa

SEQ ID NO: 916 - DNA, 21 bp, Homo sapiens
tggctgggtatctcagtttaa

SEQ ID NO: 917 - DNA, 21 bp, Homo sapiens
caggagtgtgctgtctggcaa

SEQ ID NO: 918 - DNA, 21 bp, Homo sapiens
cagtgaaataataatgatgaa

SEQ ID NO: 919 - DNA, 21 bp, Homo sapiens
cagccgcaacatggaagtaca

SEQ ID NO: 920 - DNA, 21 bp, Homo sapiens
gacgagtggtctgatgttcaa

SEQ ID NO: 921 - DNA, 21 bp, Homo sapiens
atcctggttgctaacgacaaa

SEQ ID NO: 922 - DNA, 21 bp, Homo sapiens
cgcgctgacactgtttggtta

SEQ ID NO: 923 - DNA, 21 bp, Homo sapiens
atggatgctgacctccttata

SEQ ID NO: 924 - DNA, 21 bp, Homo sapiens
ccagttggtgtcagccctgta

SEQ ID NO: 925 - DNA, 21 bp, Homo sapiens
cacgtacgggcgcatcattaa

SEQ ID NO: 926 - DNA, 21 bp, Homo sapiens
cgcagactttgtgttgctgaa

SEQ ID NO: 927 - DNA, 21 bp, Homo sapiens
cagagatttacccatcgggta

SEQ ID NO: 928 - DNA, 21 bp, Homo sapiens
ccggcctctatgcttgcgtaa

SEQ ID NO: 929 - DNA, 21 bp, Homo sapiens
cagcattcggcgtatacctaa

SEQ ID NO: 930 - DNA, 21 bp, Homo sapiens
ggagctaatgtcaatattcaa

SEQ ID NO: 931 - DNA, 21 bp, Homo sapiens
caggaacttctccggagggaa

SEQ ID NO: 932 - DNA, 21 bp, Homo sapiens
ccaggatttcatctcaccata

SEQ ID NO: 933 - DNA, 21 bp, Homo sapiens
aagcttctgcacatccggata

SEQ ID NO: 934 - DNA, 21 bp, Homo sapiens
caagattcagaaggacttgaa

SEQ ID NO: 935 - DNA, 21 bp, Homo sapiens
atcctattagtcatatattta

SEQ ID NO: 936 - DNA, 21 bp, Homo sapiens
ttgcaggacagtggttattaa

SEQ ID NO: 937 - DNA, 21 bp, Homo sapiens
aacggaaaccaccgctcttta

SEQ ID NO: 938 - DNA, 21 bp, Homo sapiens
atcgagctggctgaacggaaa

SEQ ID NO: 939 - DNA, 21 bp, Homo sapiens
aagcacgagcctgaacggtta

SEQ ID NO: 940 - DNA, 21 bp, Homo sapiens
ccggaaagcattcctctcgaa

SEQ ID NO: 941 - DNA, 21 bp, Homo sapiens
aaggatatgctgctcacctta

SEQ ID NO: 942 - DNA, 21 bp, Homo sapiens
cagaggacaatcagccggaaa

SEQ ID NO: 943 - DNA, 21 bp, Homo sapiens
ccggatagacctattggatat

SEQ ID NO: 944 - DNA, 21 bp, Homo sapiens
ttggtgttgtctggtcagtaa

SEQ ID NO: 945 - DNA, 21 bp, Homo sapiens
accggttatctaaatctatta

SEQ ID NO: 946 - DNA, 21 bp, Homo sapiens
ctgaccggttatctaaatcta

SEQ ID NO: 947 - DNA, 21 bp, Homo sapiens
cagggccaatgggaacatcaa

SEQ ID NO: 948 - DNA, 21 bp, Homo sapiens
tgggtacgtgactatccctaa

SEQ ID NO: 949 - DNA, 21 bp, Homo sapiens
caaacagtataaagcactcaa

SEQ ID NO: 950 - DNA, 21 bp, Homo sapiens
cagctcctccgtcgtgcataa

SEQ ID NO: 951 - DNA, 21 bp, Homo sapiens
cccgtggcactatgtaaataa

SEQ ID NO: 952 - DNA, 21 bp, Homo sapiens
ccgtggcactatgtaaataaa

SEQ ID NO: 953 - DNA, 21 bp, Homo sapiens
aagcatcggaaccagtacaaa

SEQ ID NO: 954 - DNA, 21 bp, Homo sapiens
tcggaaccagtacaaatttat

SEQ ID NO: 955 - DNA, 21 bp, Homo sapiens
aagtattgctaagtactataa

SEQ ID NO: 956 - DNA, 21 bp, Homo sapiens
cgcgtatatatccctctagta

SEQ ID NO: 957 - DNA, 21 bp, Homo sapiens
aaccagggcattctctatgaa

SEQ ID NO: 958 - DNA, 21 bp, Homo sapiens
ctcactcaaactggatgccaa

SEQ ID NO: 959 - DNA, 21 bp, Homo sapiens
cacgaccaacagatactataa

SEQ ID NO: 960 - DNA, 21 bp, Homo sapiens
ttgggtggttcattacagcaa

SEQ ID NO: 961 - DNA, 21 bp, Homo sapiens
agggagaatggtggaactgaa

SEQ ID NO: 962 - DNA, 21 bp, Homo sapiens
ccgcttgaggctctctatgaa

SEQ ID NO: 963 - DNA, 21 bp, Homo sapiens
accggatatcgggaagttcaa

SEQ ID NO: 964 - DNA, 21 bp, Homo sapiens
atcgggatattaagtgttcta

SEQ ID NO: 965 - DNA, 21 bp, Homo sapiens
caacattattgtcatggacta

SEQ ID NO: 966 - DNA, 21 bp, Homo sapiens
tgggcagatagtggccattaa

SEQ ID NO: 967 - DNA, 21 bp, Homo sapiens
cagcaagtcgttgctattaaa

SEQ ID NO: 968 - DNA, 21 bp, Homo sapiens
ccaaacctacgtcaagattaa

SEQ ID NO: 969 - DNA, 21 bp, Homo sapiens
acgtggtagtatatcactcaa

SEQ ID NO: 970 - DNA, 21 bp, Homo sapiens
tcgggtagcaacaaacttatt

SEQ ID NO: 971 - DNA, 21 bp, Homo sapiens
cagatctatgagattgaacaa

SEQ ID NO: 972 - DNA, 21 bp, Homo sapiens
tagcctgtttgaagctgtcta

SEQ ID NO: 973 - DNA, 21 bp, Homo sapiens
cacgctttctagaggacgata

SEQ ID NO: 974 - DNA, 21 bp, Homo sapiens
ccgagaggacctcgtctacaa

SEQ ID NO: 975 - DNA, 21 bp, Homo sapiens
acctgagtgaaagctacttaa

SEQ ID NO: 976 - DNA, 21 bp, Homo sapiens
cccggtcttgttccagggcaa

SEQ ID NO: 977 - DNA, 21 bp, Homo sapiens
ccgcttctacctggtgtttga

SEQ ID NO: 978 - DNA, 21 bp, Homo sapiens
ttggactttctgcataacaaa

SEQ ID NO: 979 - DNA, 21 bp, Homo sapiens
aggcatcacctgaatatctta

SEQ ID NO: 980 - DNA, 21 bp, Homo sapiens
tccgatgtgcattgaagcgaa

SEQ ID NO: 981 - DNA, 21 bp, Homo sapiens
accactgaattggaacggata

SEQ ID NO: 982 - DNA, 21 bp, Homo sapiens
caccactgaattggaacggat

SEQ ID NO: 983 - DNA, 21 bp, Homo sapiens
ctggcagattgttagaagata

SEQ ID NO: 984 - DNA, 21 bp, Homo sapiens
taagatccctacaaagttaaa

SEQ ID NO: 985 - DNA, 21 bp, Homo sapiens
acccaggactgttgaatacaa

SEQ ID NO: 986 - DNA, 21 bp, Homo sapiens
tacaatgaacacggcacgcaa

SEQ ID NO: 987 - DNA, 21 bp, Homo sapiens
atccgtagtaataaattctca

SEQ ID NO: 988 - DNA, 21 bp, Homo sapiens
ctgctgtgatccgtagtaata

SEQ ID NO: 989 - DNA, 21 bp, Homo sapiens
ctgggagacgttcatattgga

SEQ ID NO: 990 - DNA, 21 bp, Homo sapiens
tcgacataggcgggtcgttaa

SEQ ID NO: 991 - DNA, 21 bp, Homo sapiens
atgaactttgtgcaagattta

SEQ ID NO: 992 - DNA, 21 bp, Homo sapiens
cagagtactggccttgttcaa

SEQ ID NO: 993 - DNA, 21 bp, Homo sapiens
acgatgtaatttaatgctaaa

SEQ ID NO: 994 - DNA, 21 bp, Homo sapiens
cacgatgtaatttaatgctaa

SEQ ID NO: 995 - DNA, 21 bp, Homo sapiens
aacgcgattatcataaacata

SEQ ID NO: 996 - DNA, 21 bp, Homo sapiens
cgcggttgaaatgggcatgaa

SEQ ID NO: 997 - DNA, 21 bp, Homo sapiens
ctgggacgcggtgttcaagaa

SEQ ID NO: 998 - DNA, 21 bp, Homo sapiens
ttgggctgagttcacgaatta

SEQ ID NO: 999 - DNA, 21 bp, Homo sapiens
acgcaaatgtatgaataacaa

SEQ ID NO: 1000 - DNA, 21 bp, Homo sapiens
ccgcatcgggctaccaccaaa

SEQ ID NO: 1001 - DNA, 21 bp, Homo sapiens
aagtgtggcttgcgtaaataa

SEQ ID NO: 1002 - DNA, 21 bp, Homo sapiens
tcagtagttattagactctaa

SEQ ID NO: 1003 - DNA, 21 bp, Homo sapiens
caggaacactggtaactataa

SEQ ID NO: 1004 - DNA, 21 bp, Homo sapiens
ccagtggaactcacacagtaa

SEQ ID NO: 1005 - DNA, 21 bp, Homo sapiens
agcaagcgggttgttattgaa

SEQ ID NO: 1006 - DNA, 21 bp, Homo sapiens
cgggttgttattgaagatgat

SEQ ID NO: 1007 - DNA, 21 bp, Homo sapiens
ccgtatgtggtggattagaaa

SEQ ID NO: 1008 - DNA, 21 bp, Homo sapiens
tccgtatgtggtggattagaa

SEQ ID NO: 1009 - DNA, 21 bp, Homo sapiens
cccggtgtagaaactccatta

SEQ ID NO: 1010 - DNA, 21 bp, Homo sapiens
ccggcccagtagtgacttaaa

SEQ ID NO: 1011 - DNA, 21 bp, Homo sapiens
cacggagagcacctaccggaa

SEQ ID NO: 1012 - DNA, 21 bp, Homo sapiens
ctcaacgagagtcttgatgaa

SEQ ID NO: 1013 - DNA, 21 bp, Homo sapiens
ctagaggatcttgatgctcaa

SEQ ID NO: 1014 - DNA, 21 bp, Homo sapiens
ctgcgacgactacgagataaa

SEQ ID NO: 1015 - DNA, 21 bp, Homo sapiens
cagggaactagtcgccatcaa

SEQ ID NO: 1016 - DNA, 21 bp, Homo sapiens
ccgggtgtaaatagattgtta

SEQ ID NO: 1017 - DNA, 21 bp, Homo sapiens
caggattgcgctcgctttcat

SEQ ID NO: 1018 - DNA, 21 bp, Homo sapiens
ccgagggtagtgcctgatcaa

SEQ ID NO: 1019 - DNA, 21 bp, Homo sapiens
cggaaggaccatgttccgcaa

SEQ ID NO: 1020 - DNA, 21 bp, Homo sapiens
ctgtgttacctttcaagttta

SEQ ID NO: 1021 - DNA, 21 bp, Homo sapiens
aagggaggttatggaggtgga

SEQ ID NO: 1022 - DNA, 21 bp, Homo sapiens
caggagacctgttcagtggaa

SEQ ID NO: 1023 - DNA, 21 bp, Homo sapiens
caggcgctttctatacttaat

SEQ ID NO: 1024 - DNA, 21 bp, Homo sapiens
ccaggcgctttctatacttaa

SEQ ID NO: 1025 - DNA, 21 bp, Homo sapiens
taacaagtacttggaccctaa

SEQ ID NO: 1026 - DNA, 21 bp, Homo sapiens
tacgacggctgtcatcagtta

SEQ ID NO: 1027 - DNA, 21 bp, Homo sapiens
aacaggccgcctgaaactcaa

SEQ ID NO: 1028 - DNA, 21 bp, Homo sapiens
caggtcttgtcggcagtgaaa

SEQ ID NO: 1029 - DNA, 21 bp, Homo sapiens
acggcccaccagggtatgtaa

SEQ ID NO: 1030 - DNA, 21 bp, Homo sapiens
gagcgtgtgcttatccgttaa

SEQ ID NO: 1031 - DNA, 21 bp, Homo sapiens
aagcctgatgacgaagtgaaa

SEQ ID NO: 1032 - DNA, 21 bp, Homo sapiens
cacacgcagtatgaagataaa

SEQ ID NO: 1033 - DNA, 21 bp, Homo sapiens
aagtctgactatgtagtcaaa

SEQ ID NO: 1034 - DNA, 21 bp, Homo sapiens
tcgaagaatgttagaatatga

SEQ ID NO: 1035 - DNA, 21 bp, Homo sapiens
cagcagctacatccatgtgta

SEQ ID NO: 1036 - DNA, 21 bp, Homo sapiens
cgccatagagttccagacata

SEQ ID NO: 1037 - DNA, 21 bp, Homo sapiens
cgggcggaccatgtcaccgta

SEQ ID NO: 1038 - DNA, 21 bp, Homo sapiens
ctgcagcttctctgaacgcta

SEQ ID NO: 1039 - DNA, 21 bp, Homo sapiens
aagattggtgatctaggatta

SEQ ID NO: 1040 - DNA, 21 bp, Homo sapiens
ccgggtgacgccaataaagaa

SEQ ID NO: 1041 - DNA, 21 bp, Homo sapiens
ccctatgatgttgtcttgcaa

SEQ ID NO: 1042 - DNA, 21 bp, Homo sapiens
cgggatgtcgaagacgctgaa

SEQ ID NO: 1043 - DNA, 21 bp, Homo sapiens
ccgctggtggactgtaataat

SEQ ID NO: 1044 - DNA, 21 bp, Homo sapiens
taggctggttctcaaccggaa

SEQ ID NO: 1045 - DNA, 21 bp, Homo sapiens
acggatctagatgccagtaaa

SEQ ID NO: 1046 - DNA, 21 bp, Homo sapiens
ctggacgttactataggctca

SEQ ID NO: 1047 - DNA, 21 bp, Homo sapiens
ccgagtgagatcgaagatgga

SEQ ID NO: 1048 - DNA, 21 bp, Homo sapiens
ccggaggtcctgaagcgtcaa

SEQ ID NO: 1049 - DNA, 21 bp, Homo sapiens
aaccaacgtcttgaagcagaa

SEQ ID NO: 1050 - DNA, 21 bp, Homo sapiens
caccaacgtgtcactgctcaa

SEQ ID NO: 1051 - DNA, 21 bp, Homo sapiens
atgcccaggcttgcagaataa

SEQ ID NO: 1052 - DNA, 21 bp, Homo sapiens
tagcatatagatgtaatttat

SEQ ID NO: 1053 - DNA, 21 bp, Homo sapiens
cacgaaccaaatccaaataaa

SEQ ID NO: 1054 - DNA, 21 bp, Homo sapiens
ccggctgctgtcacccatgaa

SEQ ID NO: 1055 - DNA, 21 bp, Homo sapiens
atggaccatcctagtagggaa

SEQ ID NO: 1056 - DNA, 21 bp, Homo sapiens
ccggcagaccaatacctcata

SEQ ID NO: 1057 - DNA, 21 bp, Homo sapiens
aacacagtcatcttaccctta

SEQ ID NO: 1058 - DNA, 21 bp, Homo sapiens
caggtggtaatcattacctta

SEQ ID NO: 1059 - DNA, 21 bp, Homo sapiens
ccagctgtttaactacctgaa

SEQ ID NO: 1060 - DNA, 21 bp, Homo sapiens
cccagtgttcgtcaaagtcaa

SEQ ID NO: 1061 - DNA, 21 bp, Homo sapiens
ttgagttacactcctgttgaa

SEQ ID NO: 1062 - DNA, 21 bp, Homo sapiens
ttggcagatactaatctacca

SEQ ID NO: 1063 - DNA, 21 bp, Homo sapiens
aacctggtgcatcgaaatgta

SEQ ID NO: 1064 - DNA, 21 bp, Homo sapiens
caggttgtctgtagagaatga

SEQ ID NO: 1065 - DNA, 21 bp, Homo sapiens
aaggtgtaccacggttgtaaa

SEQ ID NO: 1066 - DNA, 21 bp, Homo sapiens
accctagaatttaatcaacaa

SEQ ID NO: 1067 - DNA, 21 bp, Homo sapiens
aaccagtacccttacatataa

SEQ ID NO: 1068 - DNA, 21 bp, Homo sapiens
tcccgaagtctccatactaaa

SEQ ID NO: 1069 - DNA, 21 bp, Homo sapiens
aaagagcgtccttgtcatcaa

SEQ ID NO: 1070 - DNA, 21 bp, Homo sapiens
ccaggagaacatgatcgtgta

SEQ ID NO: 1071 - DNA, 21 bp, Homo sapiens
ctaggtatctctggagacaaa

SEQ ID NO: 1072 - DNA, 21 bp, Homo sapiens
gaccctgttacgaatcagaaa

SEQ ID NO: 1073 - DNA, 21 bp, Homo sapiens
aagcgagaatctgttagtaaa

SEQ ID NO: 1074 - DNA, 21 bp, Homo sapiens
tccaaaggtgatagcacacaa

SEQ ID NO: 1075 - DNA, 21 bp, Homo sapiens
ccggagcagtatgctaagcga

SEQ ID NO: 1076 - DNA, 21 bp, Homo sapiens
ttgatgtgtgataatctcata

SEQ ID NO: 1077 - DNA, 21 bp, Homo sapiens
ctgcctatgcttggagtcata

SEQ ID NO: 1078 - DNA, 21 bp, Homo sapiens
tgagataagcttatagatcaa

SEQ ID NO: 1079 - DNA, 21 bp, Homo sapiens
cagatgctgagagttcttgaa

SEQ ID NO: 1080 - DNA, 21 bp, Homo sapiens
ccgggtcccagccgtggttaa

SEQ ID NO: 1081 - DNA, 21 bp, Homo sapiens
cagagcgactttgatcaccat

SEQ ID NO: 1082 - DNA, 21 bp, Homo sapiens
ctgtgtgtgaacttactgtaa

SEQ ID NO: 1083 - DNA, 21 bp, Homo sapiens
cagcccttggtcctatctgaa

SEQ ID NO: 1084 - DNA, 21 bp, Homo sapiens
caggccctacatttaaagcta

SEQ ID NO: 1085 - DNA, 21 bp, Homo sapiens
ccggaaggacatgtatgagaa

SEQ ID NO: 1086 - DNA, 21 bp, Homo sapiens
tcggccgaagcccgaaccgaa

SEQ ID NO: 1087 - DNA, 21 bp, Homo sapiens
aacgctcaacatgatcttcca

SEQ ID NO: 1088 - DNA, 21 bp, Homo sapiens
catgctgtttgtaacgctcaa

SEQ ID NO: 1089 - DNA, 21 bp, Homo sapiens
cagacttggcaccaacattaa

SEQ ID NO: 1090 - DNA, 21 bp, Homo sapiens
tagcagggacttacagatgaa

SEQ ID NO: 1091 - DNA, 21 bp, Homo sapiens
cagcatttgcatggaacacat

SEQ ID NO: 1092 - DNA, 21 bp, Homo sapiens
ccggcctgccatggccatctt

SEQ ID NO: 1093 - DNA, 21 bp, Homo sapiens
atgtgtctagtgcatccttaa

SEQ ID NO: 1094 - DNA, 21 bp, Homo sapiens
caggatggtaataggttaaga

SEQ ID NO: 1095 - DNA, 21 bp, Homo sapiens
ccggtggctgttgatggtgaa

SEQ ID NO: 1096 - DNA, 21 bp, Homo sapiens
ctgaacgaagaggatactaaa

SEQ ID NO: 1097 - DNA, 21 bp, Homo sapiens
cacagtacaagctaagtacaa

SEQ ID NO: 1098 - DNA, 21 bp, Homo sapiens
cccagtgtggatcacttgcta

SEQ ID NO: 1099 - DNA, 21 bp, Homo sapiens
ccgcatcatgaagggcctaaa

SEQ ID NO: 1100 - DNA, 21 bp, Homo sapiens
ctgcagcctgttgcccaataa

SEQ ID NO: 1101 - DNA, 21 bp, Homo sapiens
aacggtggaggtgccgaccta

SEQ ID NO: 1102 - DNA, 21 bp, Homo sapiens
tgcggtttaaagatccctcta

SEQ ID NO: 1103 - DNA, 21 bp, Homo sapiens
cgcgatgttagtgaggactat

SEQ ID NO: 1104 - DNA, 21 bp, Homo sapiens
ctgaatttgattggaaaggaa

SEQ ID NO: 1105 - DNA, 21 bp, Homo sapiens
gcccaacaagataatattcta

SEQ ID NO: 1106 - DNA, 21 bp, Homo sapiens
taccatgtccagaaccaataa

SEQ ID NO: 1107 - DNA, 21 bp, Homo sapiens
ctctgagatctcaatgcgaaa

SEQ ID NO: 1108 - DNA, 21 bp, Homo sapiens
tagcttatatatgacggtata

SEQ ID NO: 1109 - DNA, 21 bp, Homo sapiens
cagcgctacctgcggaaataa

SEQ ID NO: 1110 - DNA, 21 bp, Homo sapiens
ccggatggttaagaagatgaa

SEQ ID NO: 1111 - DNA, 21 bp, Homo sapiens
ccagctttccttggccatcaa

SEQ ID NO: 1112 - DNA, 21 bp, Homo sapiens
tagaagctgatttaacaccaa

SEQ ID NO: 1113 - DNA, 21 bp, Homo sapiens
atcgaggtgtgcaacgggaaa

SEQ ID NO: 1114 - DNA, 21 bp, Homo sapiens
ccggttggaacctgcaataaa

SEQ ID NO: 1115 - DNA, 21 bp, Homo sapiens
agcgatgagcaaactctataa

SEQ ID NO: 1116 - DNA, 21 bp, Homo sapiens
cggcgttatctggaaagtgga

SEQ ID NO: 1117 - DNA, 21 bp, Homo sapiens
cagcttgttgggcgtttccaa

SEQ ID NO: 1118 - DNA, 21 bp, Homo sapiens
caggaggagccagcaccatta

SEQ ID NO: 1119 - DNA, 21 bp, Homo sapiens
ccggacgctgttcctcgttat

SEQ ID NO: 1120 - DNA, 21 bp, Homo sapiens
gacgctgttcctcgttatgaa

SEQ ID NO: 1121 - DNA, 21 bp, Homo sapiens
acggaccatgtctgatggaaa

SEQ ID NO: 1122 - DNA, 21 bp, Homo sapiens
cgggaacttaacattctgata

SEQ ID NO: 1123 - DNA, 21 bp, Homo sapiens
cggctgattggcacaatttaa

SEQ ID NO: 1124 - DNA, 21 bp, Homo sapiens
gcggctgattggcacaattta

SEQ ID NO: 1125 - DNA, 21 bp, Homo sapiens
cacgaaccagtgaagtctata

SEQ ID NO: 1126 - DNA, 21 bp, Homo sapiens
tacacttgggtgaacatgcaa

SEQ ID NO: 1127 - DNA, 21 bp, Homo sapiens
aacgctgtaaccgacgcctta

SEQ ID NO: 1128 - DNA, 21 bp, Homo sapiens
cgggatcctcttcatgcacaa

SEQ ID NO: 1129 - DNA, 21 bp, Homo sapiens
aaggactttatagacaaacta

SEQ ID NO: 1130 - DNA, 21 bp, Homo sapiens
gaggatcaagtttacatggta

SEQ ID NO: 1131 - DNA, 21 bp, Homo sapiens
ctcgggtgtgccataataata

SEQ ID NO: 1132 - DNA, 21 bp, Homo sapiens
tacgttagaagagcactgtaa

SEQ ID NO: 1133 - DNA, 21 bp, Homo sapiens
aaggatgaaactggcttctat

SEQ ID NO: 1134 - DNA, 21 bp, Homo sapiens
cacctgcattctttacacata

SEQ ID NO: 1135 - DNA, 21 bp, Homo sapiens
cacgatgtagtcaccttacta

SEQ ID NO: 1136 - DNA, 21 bp, Homo sapiens
ccgtgtcgtatgacctagtaa

SEQ ID NO: 1137 - DNA, 21 bp, Homo sapiens
atggacctaactatacatctt

SEQ ID NO: 1138 - DNA, 21 bp, Homo sapiens
tagacgaaatgtgccattata

SEQ ID NO: 1139 - DNA, 21 bp, Homo sapiens
atggcaagtgctctccaataa

SEQ ID NO: 1140 - DNA, 21 bp, Homo sapiens
tggcaagtgctctccaataaa

SEQ ID NO: 1141 - DNA, 21 bp, Homo sapiens
cagattgacctgcgttacgaa

SEQ ID NO: 1142 - DNA, 21 bp, Homo sapiens
ccggaatgtgaaagccgtcaa

SEQ ID NO: 1143 - DNA, 21 bp, Homo sapiens
aaagttgtttccaactcataa

SEQ ID NO: 1144 - DNA, 21 bp, Homo sapiens
ctctgcgtttcttgaacctaa

SEQ ID NO: 1145 - DNA, 21 bp, Homo sapiens
agcgaagaccttggcatttat

SEQ ID NO: 1146 - DNA, 21 bp, Homo sapiens
cggcctcatgcctgtcttcaa

SEQ ID NO: 1147 - DNA, 21 bp, Homo sapiens
caagttcaatgtggctgtcaa

SEQ ID NO: 1148 - DNA, 21 bp, Homo sapiens
gtcggccttcacgtaaactaa

SEQ ID NO: 1149 - DNA, 21 bp, Homo sapiens
aagactggtggacaagtgtaa

SEQ ID NO: 1150 - DNA, 21 bp, Homo sapiens
ctgagatacgttacccaatta

SEQ ID NO: 1151 - DNA, 21 bp, Homo sapiens
cacgagcagctggaagcgtat

SEQ ID NO: 1152 - DNA, 21 bp, Homo sapiens
ctggagcagacggtgaccaaa

SEQ ID NO: 1153 - DNA, 21 bp, Homo sapiens
cagaccaaccctggtacttta

SEQ ID NO: 1154 - DNA, 21 bp, Homo sapiens
ccgggtctccatggcagctga

SEQ ID NO: 1155 - DNA, 21 bp, Homo sapiens
ctcggctgttagggatctgaa

SEQ ID NO: 1156 - DNA, 21 bp, Homo sapiens
ttgggttggtatgatacatta

SEQ ID NO: 1157 - DNA, 21 bp, Homo sapiens
acgaccggatatgggctataa

SEQ ID NO: 1158 - DNA, 21 bp, Homo sapiens
ccggatatgggctataataca

SEQ ID NO: 1159 - DNA, 21 bp, Homo sapiens
aacgctggttaaattggtgta

SEQ ID NO: 1160 - DNA, 21 bp, Homo sapiens
ccgaaggatattacagccgaa

SEQ ID NO: 1161 - DNA, 21 bp, Homo sapiens
cagcaacatgtagttaatata

SEQ ID NO: 1162 - DNA, 21 bp, Homo sapiens
caggccatcaggaactcttaa

SEQ ID NO: 1163 - DNA, 21 bp, Homo sapiens
cccactgacttcctccaataa

SEQ ID NO: 1164 - DNA, 21 bp, Homo sapiens
cccagagaacattccgggaaa

SEQ ID NO: 1165 - DNA, 21 bp, Homo sapiens
ctggacataaactaagtctaa

SEQ ID NO: 1166 - DNA, 21 bp, Homo sapiens
ctggcgtacatccaccaccaa

SEQ ID NO: 1167 - DNA, 21 bp, Homo sapiens
atccatgacatctgtgaatta

SEQ ID NO: 1168 - DNA, 21 bp, Homo sapiens
tcggctgacataatcctcgaa

SEQ ID NO: 1169 - DNA, 21 bp, Homo sapiens
aaggagcgaatcctacatcca

SEQ ID NO: 1170 - DNA, 21 bp, Homo sapiens
cacgccctaataaggagcgaa

SEQ ID NO: 1171 - DNA, 21 bp, Homo sapiens
ccgaagggagttgattggaca

SEQ ID NO: 1172 - DNA, 21 bp, Homo sapiens
tggcttagagttgtagactta

SEQ ID NO: 1173 - DNA, 21 bp, Homo sapiens
caagaataatgtgaaagataa

SEQ ID NO: 1174 - DNA, 21 bp, Homo sapiens
cagattatctttagaattcca

SEQ ID NO: 1175 - DNA, 21 bp, Homo sapiens
atggatctctctcaacaacta

SEQ ID NO: 1176 - DNA, 21 bp, Homo sapiens
ccggcggaggatcgacctcaa

SEQ ID NO: 1177 - DNA, 21 bp, Homo sapiens
cccgaactacttctcctgcaa

SEQ ID NO: 1178 - DNA, 21 bp, Homo sapiens
ctcattctagtccaatggtaa

SEQ ID NO: 1179 - DNA, 21 bp, Homo sapiens
atgctcaagagtcacattaaa

SEQ ID NO: 1180 - DNA, 21 bp, Homo sapiens
cagcagggtatttaagtgcta

SEQ ID NO: 1181 - DNA, 21 bp, Homo sapiens
caagattgtcttgaccattta

SEQ ID NO: 1182 - DNA, 21 bp, Homo sapiens
gacgatcaatatataattaga

SEQ ID NO: 1183 - DNA, 21 bp, Homo sapiens
acccagtaacataatatttca

SEQ ID NO: 1184 - DNA, 21 bp, Homo sapiens
ttgccgttacccagtaacata

SEQ ID NO: 1185 - DNA, 21 bp, Homo sapiens
acgatagaggtggttctgtaa

SEQ ID NO: 1186 - DNA, 21 bp, Homo sapiens
cagagatatcaagtccaagaa

SEQ ID NO: 1187 - DNA, 21 bp, Homo sapiens
aagctagactctaccctctaa

SEQ ID NO: 1188 - DNA, 21 bp, Homo sapiens
cagccaaagtacgatctaata

SEQ ID NO: 1189 - DNA, 21 bp, Homo sapiens
acggttcgaggtcttcaagaa

SEQ ID NO: 1190 - DNA, 21 bp, Homo sapiens
atgggacatggtaccgttgta

SEQ ID NO: 1191 - DNA, 21 bp, Homo sapiens
aaggtggatgtccgcatgatt

SEQ ID NO: 1192 - DNA, 21 bp, Homo sapiens
ccggcagatgcggaaatgcga

SEQ ID NO: 1193 - DNA, 21 bp, Homo sapiens
cacccagatgctgctagagaa

SEQ ID NO: 1194 - DNA, 21 bp, Homo sapiens
ctggttctagttctggttcta

SEQ ID NO: 1195 - DNA, 21 bp, Homo sapiens
ccgatgagaaacctcgtgtta

SEQ ID NO: 1196 - DNA, 21 bp, Homo sapiens
gaggaagagatctatacccta

SEQ ID NO: 1197 - DNA, 21 bp, Homo sapiens
aagctgatcggcatcattgaa

SEQ ID NO: 1198 - DNA, 21 bp, Homo sapiens
caggagaacttaaagcccaaa

SEQ ID NO: 1199 - DNA, 21 bp, Homo sapiens
agcgaaataagcaatacgtta

SEQ ID NO: 1200 - DNA, 21 bp, Homo sapiens
cacaattgattccaacacaaa

SEQ ID NO: 1201 - DNA, 21 bp, Homo sapiens
acggcccaggttaaatggaaa

SEQ ID NO: 1202 - DNA, 21 bp, Homo sapiens
cacattggtcatgacatgtta

SEQ ID NO: 1203 - DNA, 21 bp, Homo sapiens
ccggagttgtgttactgctta

SEQ ID NO: 1204 - DNA, 21 bp, Homo sapiens
cggagttgtgttactgcttaa

SEQ ID NO: 1205 - DNA, 21 bp, Homo sapiens
ccgggcttcgtgcccaacaaa

SEQ ID NO: 1206 - DNA, 21 bp, Homo sapiens
tccgagaatgactatcttcaa

SEQ ID NO: 1207 - DNA, 21 bp, Homo sapiens
atccggtgacctcgaatccaa

SEQ ID NO: 1208 - DNA, 21 bp, Homo sapiens
tccgttgtgagggatgccaaa

SEQ ID NO: 1209 - DNA, 21 bp, Homo sapiens
cagagctagtcagtacatgaa

SEQ ID NO: 1210 - DNA, 21 bp, Homo sapiens
cagcatggcagttgacaacaa

SEQ ID NO: 1211 - DNA, 21 bp, Homo sapiens
aaggcctttgctgagcagata

SEQ ID NO: 1212 - DNA, 21 bp, Homo sapiens
ccgctacttccttatggctaa

SEQ ID NO: 1213 - DNA, 21 bp, Homo sapiens
aagcagtactgtagtactgaa

SEQ ID NO: 1214 - DNA, 21 bp, Homo sapiens
ccacatatgaatgcaggacta

SEQ ID NO: 1215 - DNA, 21 bp, Homo sapiens
atggaggaattcgagcctcaa

SEQ ID NO: 1216 - DNA, 21 bp, Homo sapiens
ttcggtgatctttggtctgaa

SEQ ID NO: 1217 - DNA, 21 bp, Homo sapiens
gagccgatccttagaaagaaa

SEQ ID NO: 1218 - DNA, 21 bp, Homo sapiens
tcgtctgatgataaccttgaa

SEQ ID NO: 1219 - DNA, 21 bp, Homo sapiens
accgttgcttgtggatttata

SEQ ID NO: 1220 - DNA, 21 bp, Homo sapiens
ctggtcgcttacatcacttta

SEQ ID NO: 1221 - DNA, 21 bp, Homo sapiens
atgatctggatccgtattata

SEQ ID NO: 1222 - DNA, 21 bp, Homo sapiens
atggtgtgcacgtttcattaa

SEQ ID NO: 1223 - DNA, 21 bp, Homo sapiens
caggtggagtataatgacata

SEQ ID NO: 1224 - DNA, 21 bp, Homo sapiens
ccggatctagattccgtagat

SEQ ID NO: 1225 - DNA, 21 bp, Homo sapiens
acggacagttgggcaccaata

SEQ ID NO: 1226 - DNA, 21 bp, Homo sapiens
ccagaagctggtgatcatcaa

SEQ ID NO: 1227 - DNA, 21 bp, Homo sapiens
aaggagaagtgcagagagtaa

SEQ ID NO: 1228 - DNA, 21 bp, Homo sapiens
tggcgagatagttgccctcaa

SEQ ID NO: 1229 - DNA, 21 bp, Homo sapiens
aggagccgagatggaaattta

SEQ ID NO: 1230 - DNA, 21 bp, Homo sapiens
gcggacggagtacgccatcaa

SEQ ID NO: 1231 - DNA, 21 bp, Homo sapiens
cccattgtcgtttcttatgta

SEQ ID NO: 1232 - DNA, 21 bp, Homo sapiens
tacgaggatgaattgactcaa

SEQ ID NO: 1233 - DNA, 21 bp, Homo sapiens
agggaagctgtacaccactaa

SEQ ID NO: 1234 - DNA, 21 bp, Homo sapiens
ctgagctatgtttgtaatgca

SEQ ID NO: 1235 - DNA, 21 bp, Homo sapiens
cagcattaaaccagaccttat

SEQ ID NO: 1236 - DNA, 21 bp, Homo sapiens
tagctggttatgaactagtaa

SEQ ID NO: 1237 - DNA, 21 bp, Homo sapiens
aactgttggctttggattaaa

SEQ ID NO: 1238 - DNA, 21 bp, Homo sapiens
cagcaggcacgttaactcgaa

SEQ ID NO: 1239 - DNA, 21 bp, Homo sapiens
cagcatgtgtatattagataa

SEQ ID NO: 1240 - DNA, 21 bp, Homo sapiens
ccggaatgccttaccagacat

SEQ ID NO: 1241 - DNA, 21 bp, Homo sapiens
ccacaagatgttatttattga

SEQ ID NO: 1242 - DNA, 21 bp, Homo sapiens
gagctccatgtcccagataaa

SEQ ID NO: 1243 - DNA, 21 bp, Homo sapiens
atgattatcattagaagctaa

SEQ ID NO: 1244 - DNA, 21 bp, Homo sapiens
tcacttgatcatatgacgaaa

SEQ ID NO: 1245 - DNA, 21 bp, Homo sapiens
cgggtgcaatttggcattgaa

SEQ ID NO: 1246 - DNA, 21 bp, Homo sapiens
gaggcctatctgagactataa

SEQ ID NO: 1247 - DNA, 21 bp, Homo sapiens
aagccagtcattcgagatgaa

SEQ ID NO: 1248 - DNA, 21 bp, Homo sapiens
ctggatctcttacgtaattca

SEQ ID NO: 1249 - DNA, 21 bp, Homo sapiens
aacatcaagattatcagcaaa

SEQ ID NO: 1250 - DNA, 21 bp, Homo sapiens
cccgatcagtggagacgttga

SEQ ID NO: 1251 - DNA, 21 bp, Homo sapiens
acggaggacaatgaccttgca

SEQ ID NO: 1252 - DNA, 21 bp, Homo sapiens
gaccatgaatttcattgtaaa

SEQ ID NO: 1253 - DNA, 21 bp, Homo sapiens
atggcattatttgatctgaaa

SEQ ID NO: 1254 - DNA, 21 bp, Homo sapiens
cggcttaaactttgatctgta

SEQ ID NO: 1255 - DNA, 21 bp, Homo sapiens
ccggccagagtccttcttcca

SEQ ID NO: 1256 - DNA, 21 bp, Homo sapiens
ctgggaggaacttaccgtcta

SEQ ID NO: 1257 - DNA, 21 bp, Homo sapiens
aacggtgactctcattcttta

SEQ ID NO: 1258 - DNA, 21 bp, Homo sapiens
ccggtatcatgttattagaaa

SEQ ID NO: 1259 - DNA, 21 bp, Homo sapiens
caccgtgtgggctgagtttaa

SEQ ID NO: 1260 - DNA, 21 bp, Homo sapiens
cacgctcttggtcaacaggaa

SEQ ID NO: 1261 - DNA, 21 bp, Homo sapiens
cagcctgtgtagtgtgacaaa

SEQ ID NO: 1262 - DNA, 21 bp, Homo sapiens
ctgaccaatcaagtacactaa

SEQ ID NO: 1263 - DNA, 21 bp, Homo sapiens
caggatgttactcaccaagaa

SEQ ID NO: 1264 - DNA, 21 bp, Homo sapiens
ccgggtgtttcaaagacatca

SEQ ID NO: 1265 - DNA, 21 bp, Homo sapiens
agcgaacttgtcatagattta

SEQ ID NO: 1266 - DNA, 21 bp, Homo sapiens
caccattgaacagttatccta

SEQ ID NO: 1267 - DNA, 21 bp, Homo sapiens
cccggcatttacgccctggaa

SEQ ID NO: 1268 - DNA, 21 bp, Homo sapiens
ttcatgtagatcaccagtcaa

SEQ ID NO: 1269 - DNA, 21 bp, Homo sapiens
ctcgaagatcatggtctctga

SEQ ID NO: 1270 - DNA, 21 bp, Homo sapiens
tccgtgtgtcacagcccgaaa

SEQ ID NO: 1271 - DNA, 21 bp, Homo sapiens
atgaattgccaccacattaaa

SEQ ID NO: 1272 - DNA, 21 bp, Homo sapiens
gaggagcttgaccacatatta

SEQ ID NO: 1273 - DNA, 21 bp, Homo sapiens
agcgatgaaattgtcgtgtat

SEQ ID NO: 1274 - DNA, 21 bp, Homo sapiens
cagcgatgaaattgtcgtgta

SEQ ID NO: 1275 - DNA, 21 bp, Homo sapiens
caggaccgaaatattcggata

SEQ ID NO: 1276 - DNA, 21 bp, Homo sapiens
cccgtttgtactgatgtatga

SEQ ID NO: 1277 - DNA, 21 bp, Homo sapiens
cagaccgacattgtggactta

SEQ ID NO: 1278 - DNA, 21 bp, Homo sapiens
caggacactgtgagggaacaa

SEQ ID NO: 1279 - DNA, 21 bp, Homo sapiens
aaggaccatattgatagaaca

SEQ ID NO: 1280 - DNA, 21 bp, Homo sapiens
ctggaatataagcgcaaacaa

SEQ ID NO: 1281 - DNA, 21 bp, Homo sapiens
cacgcatgtcaaattctcata

SEQ ID NO: 1282 - DNA, 21 bp, Homo sapiens
ctccgggtgtttcaactagaa

SEQ ID NO: 1283 - DNA, 21 bp, Homo sapiens
ctgaaattctggacaccttaa

SEQ ID NO: 1284 - DNA, 21 bp, Homo sapiens
ggcaagtatgctacaaattta

SEQ ID NO: 1285 - DNA, 21 bp, Homo sapiens
caggaacgagaagtttaacta

SEQ ID NO: 1286 - DNA, 21 bp, Homo sapiens
tggcaggaacgagaagtttaa

SEQ ID NO: 1287 - DNA, 21 bp, Homo sapiens
cgccggtggctttgcactcta

SEQ ID NO: 1288 - DNA, 21 bp, Homo sapiens
ctcgccgcctaccaacttcaa

SEQ ID NO: 1289 - DNA, 21 bp, Homo sapiens
aagggcgaagctggtccgtta

SEQ ID NO: 1290 - DNA, 21 bp, Homo sapiens
ctggaagtcagctgacattaa

SEQ ID NO: 1291 - DNA, 21 bp, Homo sapiens
accgtaggagatgttcgtcaa

SEQ ID NO: 1292 - DNA, 21 bp, Homo sapiens
tagggatagaccatcagtcaa

SEQ ID NO: 1293 - DNA, 21 bp, Homo sapiens
ctcaaagattcgtaaacccaa

SEQ ID NO: 1294 - DNA, 21 bp, Homo sapiens
caccaactcaaagattcgtaa

SEQ ID NO: 1295 - DNA, 21 bp, Homo sapiens
cacggagaccgtacgaaagta

SEQ ID NO: 1296 - DNA, 21 bp, Homo sapiens
acggatgagcatggccttgta

SEQ ID NO: 1297 - DNA, 21 bp, Homo sapiens
aaggttctacttgagcaagaa

SEQ ID NO: 1298 - DNA, 21 bp, Homo sapiens
aaggctgtgcttgatgtattt

SEQ ID NO: 1299 - DNA, 21 bp, Homo sapiens
cccaagatactcatcagtcaa

SEQ ID NO: 1300 - DNA, 21 bp, Homo sapiens
aaggaccattgtgcgtttcaa

SEQ ID NO: 1301 - DNA, 21 bp, Homo sapiens
cagggaagccctatccatgta

SEQ ID NO: 1302 - DNA, 21 bp, Homo sapiens
gaggaagagatactagttaaa

SEQ ID NO: 1303 - DNA, 21 bp, Homo sapiens
ccgcagagagatggacaagat

SEQ ID NO: 1304 - DNA, 21 bp, Homo sapiens
ctgggtcagtcccgtatttat

SEQ ID NO: 1305 - DNA, 21 bp, Homo sapiens
cagcatgcccacctacctcaa

SEQ ID NO: 1306 - DNA, 21 bp, Homo sapiens
ctggaagaacgtgacgctcaa

SEQ ID NO: 1307 - DNA, 21 bp, Homo sapiens
cacggagaaattacatgtgga

SEQ ID NO: 1308 - DNA, 21 bp, Homo sapiens
ccaagtttatctcatccttta

SEQ ID NO: 1309 - DNA, 21 bp, Homo sapiens
tacgttgtgaccatccagaaa

SEQ ID NO: 1310 - DNA, 21 bp, Homo sapiens
ccgcttgaagattcagtcgga

SEQ ID NO: 1311 - DNA, 21 bp, Homo sapiens
ctgggcgaatgtcttatttaa

SEQ ID NO: 1312 - DNA, 21 bp, Homo sapiens
ccagtggagataacactctaa

SEQ ID NO: 1313 - DNA, 21 bp, Homo sapiens
acgcacggacatcaccatgaa

SEQ ID NO: 1314 - DNA, 21 bp, Homo sapiens
aacactctaagcataactaaa

SEQ ID NO: 1315 - DNA, 21 bp, Homo sapiens
cacggacgtgattgagatgaa

SEQ ID NO: 1316 - DNA, 21 bp, Homo sapiens
cagcgaagagatctacattaa

SEQ ID NO: 1317 - DNA, 21 bp, Homo sapiens
cacgctgctcaatgagctgaa

SEQ ID NO: 1318 - DNA, 21 bp, Homo sapiens
aaggccatggttaattcttaa

SEQ ID NO: 1319 - DNA, 21 bp, Homo sapiens
tccgtaggtggtcttatgaaa

SEQ ID NO: 1320 - DNA, 21 bp, Homo sapiens
tcgcatcacaattggcaataa

SEQ ID NO: 1321 - DNA, 21 bp, Homo sapiens
aacgcaggcatcagaagatta

SEQ ID NO: 1322 - DNA, 21 bp, Homo sapiens
ctggataatctggtcaatgta

SEQ ID NO: 1323 - DNA, 21 bp, Homo sapiens
aaggagatgagtatattatta

SEQ ID NO: 1324 - DNA, 21 bp, Homo sapiens
aaggtacttcacaaattcaaa

SEQ ID NO: 1325 - DNA, 21 bp, Homo sapiens
ctggctgaaatggcaatgaaa

SEQ ID NO: 1326 - DNA, 21 bp, Homo sapiens
caacttgacagtaactttgta

SEQ ID NO: 1327 - DNA, 21 bp, Homo sapiens
cgggctaactgatgtctacaa

SEQ ID NO: 1328 - DNA, 21 bp, Homo sapiens
ccagatgtagtggtgaaagaa

SEQ ID NO: 1329 - DNA, 21 bp, Homo sapiens
aagctgaatattgcacgaaat

SEQ ID NO: 1330 - DNA, 21 bp, Homo sapiens
tagtctggttgtactagcaaa

SEQ ID NO: 1331 - DNA, 21 bp, Homo sapiens
cactggtgtgcaagacatcaa

SEQ ID NO: 1332 - DNA, 21 bp, Homo sapiens
acggcgctgctcatcctgcaa

SEQ ID NO: 1333 - DNA, 21 bp, Homo sapiens
ctggtacgtgctagccggaaa

SEQ ID NO: 1334 - DNA, 21 bp, Homo sapiens
ctcgggcaagtccctctttaa

SEQ ID NO: 1335 - DNA, 21 bp, Homo sapiens
atgaacaggtttatattcgaa

SEQ ID NO: 1336 - DNA, 21 bp, Homo sapiens
ctctattaccattatggataa

SEQ ID NO: 1337 - DNA, 21 bp, Homo sapiens
ccggactttgatgagtgctat

SEQ ID NO: 1338 - DNA, 21 bp, Homo sapiens
acagatggcgctagatgttta

SEQ ID NO: 1339 - DNA, 21 bp, Homo sapiens
tccatagatcatcaaacttca

SEQ ID NO: 1340 - DNA, 21 bp, Homo sapiens
atggaacgaggatgcaaatta

SEQ ID NO: 1341 - DNA, 21 bp, Homo sapiens
ccagcagtgcatgttaaagaa

SEQ ID NO: 1342 - DNA, 21 bp, Homo sapiens
caggcacaatattaaattgct

SEQ ID NO: 1343 - DNA, 21 bp, Homo sapiens
ccgctggaattcatgagacaa

SEQ ID NO: 1344 - DNA, 21 bp, Homo sapiens
caggaagtgcttctaaagtca

SEQ ID NO: 1345 - DNA, 21 bp, Homo sapiens
ccgggagactgagatctataa

SEQ ID NO: 1346 - DNA, 21 bp, Homo sapiens
cacggactgctttgagtccta

SEQ ID NO: 1347 - DNA, 21 bp, Homo sapiens
caggaagacgctggaataaga

SEQ ID NO: 1348 - DNA, 21 bp, Homo sapiens
caccgagttcgtcaaccacta

SEQ ID NO: 1349 - DNA, 21 bp, Homo sapiens
ccggctacacagagacctata

SEQ ID NO: 1350 - DNA, 21 bp, Homo sapiens
aggcatcatcgtctaccgcaa

SEQ ID NO: 1351 - DNA, 21 bp, Homo sapiens
caagctatatcagaaactcaa

SEQ ID NO: 1352 - DNA, 21 bp, Homo sapiens
cccagctttgtgtgtgtttaa

SEQ ID NO: 1353 - DNA, 21 bp, Homo sapiens
atggtgttgctgagagtgtta

SEQ ID NO: 1354 - DNA, 21 bp, Homo sapiens
accaaacttcacagactgtaa

SEQ ID NO: 1355 - DNA, 21 bp, Homo sapiens
atggtaagaagaagtccttaa

SEQ ID NO: 1356 - DNA, 21 bp, Homo sapiens
atgggacacatgagacgctaa

SEQ ID NO: 1357 - DNA, 21 bp, Homo sapiens
aagtgcttaggtaatgagcta

SEQ ID NO: 1358 - DNA, 21 bp, Homo sapiens
cagcctgagtctagcatgttt

SEQ ID NO: 1359 - DNA, 21 bp, Homo sapiens
cagcccggatgctgaatttaa

SEQ ID NO: 1360 - DNA, 21 bp, Homo sapiens
accatgtatttcagtgaaata

SEQ ID NO: 1361 - DNA, 21 bp, Homo sapiens
aagaatgtgtatagtgccaat

SEQ ID NO: 1362 - DNA, 21 bp, Homo sapiens
tccgttgcagttgatccacaa

SEQ ID NO: 1363 - DNA, 21 bp, Homo sapiens
ctggttcagaagccaagttat

SEQ ID NO: 1364 - DNA, 21 bp, Homo sapiens
ctgcaggatagaccagttaaa

SEQ ID NO: 1365 - DNA, 21 bp, Homo sapiens
aaccaatccattacagcttaa

SEQ ID NO: 1366 - DNA, 21 bp, Homo sapiens
aagcctcaattactaattgta

SEQ ID NO: 1367 - DNA, 21 bp, Homo sapiens
aaggaggtagctgtctccaaa

SEQ ID NO: 1368 - DNA, 21 bp, Homo sapiens
aagaccttagacataaagtaa

SEQ ID NO: 1369 - DNA, 21 bp, Homo sapiens
atgcattaataacaaatattt

SEQ ID NO: 1370 - DNA, 21 bp, Homo sapiens
gggaaattatttgtcaagcaa

SEQ ID NO: 1371 - DNA, 21 bp, Homo sapiens
ctgctcttcagagatgttaaa

SEQ ID NO: 1372 - DNA, 21 bp, Homo sapiens
actggatgcattaataacaaa

SEQ ID NO: 1373 - DNA, 21 bp, Homo sapiens
caccagtacatttaccgagta

SEQ ID NO: 1374 - DNA, 21 bp, Homo sapiens
cagatatagcgtataaagata

SEQ ID NO: 1375 - DNA, 21 bp, Homo sapiens
ctgggaattagtataataaca

SEQ ID NO: 1376 - DNA, 21 bp, Homo sapiens
aacgattaagaatcatcatta

SEQ ID NO: 1377 - DNA, 21 bp, Homo sapiens
tccactgatggaagagctgaa

SEQ ID NO: 1378 - DNA, 21 bp, Homo sapiens
aagttgtaccacaatattcaa

SEQ ID NO: 1379 - DNA, 21 bp, Homo sapiens
tagtttgatagtgccacttaa

SEQ ID NO: 1380 - DNA, 21 bp, Homo sapiens
aagggtatggtaatgcttgta

SEQ ID NO: 1381 - DNA, 21 bp, Homo sapiens
agaggtaactatcaatattta

SEQ ID NO: 1382 - DNA, 21 bp, Homo sapiens
accgagtctctgtataatcta

SEQ ID NO: 1383 - DNA, 21 bp, Homo sapiens
gaggtaactatcaatatttaa

SEQ ID NO: 1384 - DNA, 21 bp, Homo sapiens
ctgtataatctatttacataa

SEQ ID NO: 1385 - DNA, 21 bp, Homo sapiens
ccacaccaattcggttgtgaa

SEQ ID NO: 1386 - DNA, 21 bp, Homo sapiens
aagggcttgggttctgaggaa

SEQ ID NO: 1387 - DNA, 21 bp, Homo sapiens
caggagtgtcctgatgattca

SEQ ID NO: 1388 - DNA, 21 bp, Homo sapiens
cagcatgaggcccagcaagaa

SEQ ID NO: 1389 - DNA, 21 bp, Homo sapiens
caactgcatcatctactttaa

SEQ ID NO: 1390 - DNA, 21 bp, Homo sapiens
ccctatcgtctatgcctataa

SEQ ID NO: 1391 - DNA, 21 bp, Homo sapiens
tcggaacaaactcagtctgaa

SEQ ID NO: 1392 - DNA, 21 bp, Homo sapiens
aagcgtcaactcgtgcaagaa

SEQ ID NO: 1393 - DNA, 21 bp, Homo sapiens
ctggtctacctcctaaatata

SEQ ID NO: 1394 - DNA, 21 bp, Homo sapiens
cagagttatgtttacgaataa

SEQ ID NO: 1395 - DNA, 21 bp, Homo sapiens
cttgaaatatgtagtattaaa

SEQ ID NO: 1396 - DNA, 21 bp, Homo sapiens
cccggtggctgtggtatgaat

SEQ ID NO: 1397 - DNA, 21 bp, Homo sapiens
ccgagaaatctcttacctcaa

SEQ ID NO: 1398 - DNA, 21 bp, Homo sapiens
acggtgatcggtagcaacaaa

SEQ ID NO: 1399 - DNA, 21 bp, Homo sapiens
ggcggtcattctagtcatgta

SEQ ID NO: 1400 - DNA, 21 bp, Homo sapiens
caggagttccatagctgtcaa

SEQ ID NO: 1401 - DNA, 21 bp, Homo sapiens
gagggcggactctaagatgaa

SEQ ID NO: 1402 - DNA, 21 bp, Homo sapiens
ccgtgtctatatagtggccaa

SEQ ID NO: 1403 - DNA, 21 bp, Homo sapiens
cccgctgtaaatatacactat

SEQ ID NO: 1404 - DNA, 21 bp, Homo sapiens
gtggatcaagacataagtaaa

SEQ ID NO: 1405 - DNA, 21 bp, Homo sapiens
ctcccgccgcttagaaataaa

SEQ ID NO: 1406 - DNA, 21 bp, Homo sapiens
caaggcttggtgcgagatcta

SEQ ID NO: 1407 - DNA, 21 bp, Homo sapiens
caggcccttggtggaattcta

SEQ ID NO: 1408 - DNA, 21 bp, Homo sapiens
cggctggaggctcgcaagaaa

SEQ ID NO: 1409 - DNA, 21 bp, Homo sapiens
cggctggaggctcgcaagaaa

SEQ ID NO: 1410 - DNA, 21 bp, Homo sapiens
ccgggagatcttcgactcata

SEQ ID NO: 1411 - DNA, 21 bp, Homo sapiens
aagctacttgattgcgaccaa

SEQ ID NO: 1412 - DNA, 21 bp, Homo sapiens
tgggattaactaatcattgaa

SEQ ID NO: 1413 - DNA, 21 bp, Homo sapiens
caagtgtatgggattaactaa

SEQ ID NO: 1414 - DNA, 21 bp, Homo sapiens
aagatgttcagtgttgggtaa

SEQ ID NO: 1415 - DNA, 21 bp, Homo sapiens
tagctgtgcctttccaataaa

SEQ ID NO: 1416 - DNA, 21 bp, Homo sapiens
cggcttgaacatcgagatgca

SEQ ID NO: 1417 - DNA, 21 bp, Homo sapiens
ctgacatgtgaggcaagctaa

SEQ ID NO: 1418 - DNA, 21 bp, Homo sapiens
caggcccacctctccaaggaa

SEQ ID NO: 1419 - DNA, 21 bp, Homo sapiens
tagctcctggtggaaccgtaa

SEQ ID NO: 1420 - DNA, 21 bp, Homo sapiens
cacggctggtgttcccaataa

SEQ ID NO: 1421 - DNA, 21 bp, Homo sapiens
ctgtataatctctctcctgta

SEQ ID NO: 1422 - DNA, 21 bp, Homo sapiens
aagggagtatctgtgaaggaa

SEQ ID NO: 1423 - DNA, 21 bp, Homo sapiens
ctgaagaagacaactgcagaa

SEQ ID NO: 1424 - DNA, 21 bp, Homo sapiens
cagccgcacctagctggccaa

SEQ ID NO: 1425 - DNA, 21 bp, Homo sapiens
aagctgggtactgccatgaat

SEQ ID NO: 1426 - DNA, 21 bp, Homo sapiens
caagctgggtactgccatgaa

SEQ ID NO: 1427 - DNA, 21 bp, Homo sapiens
accgaccagcttgtttgtgaa

SEQ ID NO: 1428 - DNA, 21 bp, Homo sapiens
ctgtttgaatgcggaacaata

SEQ ID NO: 1429 - DNA, 21 bp, Homo sapiens
ctccgtgtagtgtctgtaata

SEQ ID NO: 1430 - DNA, 21 bp, Homo sapiens
cagagtctacccaacagctta

SEQ ID NO: 1431 - DNA, 21 bp, Homo sapiens
atccaagatgattgtcccaaa

SEQ ID NO: 1432 - DNA, 21 bp, Homo sapiens
ctggatgtattgattcaacta

SEQ ID NO: 1433 - DNA, 21 bp, Homo sapiens
cgcgggtttgatatttgacaa

SEQ ID NO: 1434 - DNA, 21 bp, Homo sapiens
acgcacaatgcttgtagccaa

SEQ ID NO: 1435 - DNA, 21 bp, Homo sapiens
cacctgcatcagctacgtcaa

SEQ ID NO: 1436 - DNA, 21 bp, Homo sapiens
caccatcatgctgacctgtta

SEQ ID NO: 1437 - DNA, 21 bp, Homo sapiens
cactgtggttcatcaaataaa

SEQ ID NO: 1438 - DNA, 21 bp, Homo sapiens
caccactaaggtgcagtgcta

SEQ ID NO: 1439 - DNA, 21 bp, Homo sapiens
ccgagtgcacccgatgaccaa

SEQ ID NO: 1440 - DNA, 21 bp, Homo sapiens
ctggagagacatcgtcagcta

SEQ ID NO: 1441 - DNA, 21 bp, Homo sapiens
ccaggatgtaccatcacacaa

SEQ ID NO: 1442 - DNA, 21 bp, Homo sapiens
ctcccgggaatgtttaataaa

SEQ ID NO: 1443 - DNA, 21 bp, Homo sapiens
acggcagggcagcatcctcta

SEQ ID NO: 1444 - DNA, 21 bp, Homo sapiens
atggatgatatgatgctggaa

SEQ ID NO: 1445 - DNA, 21 bp, Homo sapiens
atcgaacttaatagtaccctt

SEQ ID NO: 1446 - DNA, 21 bp, Homo sapiens
atgctctgtacaaagatataa

SEQ ID NO: 1447 - DNA, 21 bp, Homo sapiens
ccagggctgatttatagacaa

SEQ ID NO: 1448 - DNA, 21 bp, Homo sapiens
ctgaaagaccttccttaataa

SEQ ID NO: 1449 - DNA, 21 bp, Homo sapiens
aagcttatatgtgcctgttaa

SEQ ID NO: 1450 - DNA, 21 bp, Homo sapiens
cacatgcgatctacattaata

SEQ ID NO: 1451 - DNA, 21 bp, Homo sapiens
cccagatatcatgtccctgaa

SEQ ID NO: 1452 - DNA, 21 bp, Homo sapiens
cagagtcaacaaattaaataa

SEQ ID NO: 1453 - DNA, 21 bp, Homo sapiens
aagccagagtcaacaaattaa

SEQ ID NO: 1454 - DNA, 21 bp, Homo sapiens
cacctagcagttggttggcaa

SEQ ID NO: 1455 - DNA, 21 bp, Homo sapiens
cagggtttacccagtgggaca

SEQ ID NO: 1456 - DNA, 21 bp, Homo sapiens
aaggtttaaatttgttattgt

SEQ ID NO: 1457 - DNA, 21 bp, Homo sapiens
cacgcttggtcccgaggccaa

SEQ ID NO: 1458 - DNA, 21 bp, Homo sapiens
acgctacttcctcctcaagaa

SEQ ID NO: 1459 - DNA, 21 bp, Homo sapiens
cagggtatcggtgatgagcta

SEQ ID NO: 1460 - DNA, 21 bp, Homo sapiens
aagggtgagccatcaagctaa

SEQ ID NO: 1461 - DNA, 21 bp, Homo sapiens
cccaagaactagaactttaaa

SEQ ID NO: 1462 - DNA, 21 bp, Homo sapiens
ctcccaataatcaacagcaaa

SEQ ID NO: 1463 - DNA, 21 bp, Homo sapiens
ccgcaccttcctgtcggtgta

SEQ ID NO: 1464 - DNA, 21 bp, Homo sapiens
ccacctctttctacagcctaa

SEQ ID NO: 1465 - DNA, 21 bp, Homo sapiens
ctcggaggagatcgccttcta

SEQ ID NO: 1466 - DNA, 21 bp, Homo sapiens
ctctttctacagcctaattta

SEQ ID NO: 1467 - DNA, 21 bp, Homo sapiens
caggcatacactgaagtgaaa

SEQ ID NO: 1468 - DNA, 21 bp, Homo sapiens
cacagtcaaagtgcctcagaa

SEQ ID NO: 1469 - DNA, 21 bp, Homo sapiens
aagctattgtttacaattata

SEQ ID NO: 1470 - DNA, 21 bp, Homo sapiens
cagccattgatggaaagttca

SEQ ID NO: 1471 - DNA, 21 bp, Homo sapiens
cttggattactcagccataaa

SEQ ID NO: 1472 - DNA, 21 bp, Homo sapiens
ttgaactaggtggatactaaa

SEQ ID NO: 1473 - DNA, 21 bp, Homo sapiens
ctcagagttctacctatctaa

SEQ ID NO: 1474 - DNA, 21 bp, Homo sapiens
cagcacgtggatgttgacaaa

SEQ ID NO: 1475 - DNA, 21 bp, Homo sapiens
ttgggaaaggattcacagtaa

SEQ ID NO: 1476 - DNA, 21 bp, Homo sapiens
accagtgtgtgtataacgaaa

SEQ ID NO: 1477 - DNA, 21 bp, Homo sapiens
aacggtctggatcaactgcta

SEQ ID NO: 1478 - DNA, 21 bp, Homo sapiens
aaccttgatagtgatacgtta

SEQ ID NO: 1479 - DNA, 21 bp, Homo sapiens
ctccggcctggagaaattaaa

SEQ ID NO: 1480 - DNA, 21 bp, Homo sapiens
cacggccgtctccaccagaaa

SEQ ID NO: 1481 - DNA, 21 bp, Homo sapiens
caggcctggatgaaggatgaa

SEQ ID NO: 1482 - DNA, 21 bp, Homo sapiens
cccaccctataccgactggaa

SEQ ID NO: 1483 - DNA, 21 bp, Homo sapiens
cagtgacacattggcaattaa

SEQ ID NO: 1484 - DNA, 21 bp, Homo sapiens
cagcattgatgtcgaaggaaa

SEQ ID NO: 1485 - DNA, 21 bp, Homo sapiens
cactcgagaattatagccaat

SEQ ID NO: 1486 - DNA, 21 bp, Homo sapiens
tcgcctagtagaccacgccta

SEQ ID NO: 1487 - DNA, 21 bp, Homo sapiens
ctgtctctgcttcgagatcaa

SEQ ID NO: 1488 - DNA, 21 bp, Homo sapiens
tccggcacactgccaaataaa

SEQ ID NO: 1489 - DNA, 21 bp, Homo sapiens
cacgtcaacgattctatttga

SEQ ID NO: 1490 - DNA, 21 bp, Homo sapiens
gccaaataaacagctatttaa

SEQ ID NO: 1491 - DNA, 21 bp, Homo sapiens
caagcccaaagctgtgctaaa

SEQ ID NO: 1492 - DNA, 21 bp, Homo sapiens
cccaaagctgtgctaaaccaa

SEQ ID NO: 1493 - DNA, 21 bp, Homo sapiens
ctggccctatgaatatctgaa

SEQ ID NO: 1494 - DNA, 21 bp, Homo sapiens
ctggtatgcctgggtccctaa

SEQ ID NO: 1495 - DNA, 21 bp, Homo sapiens
ccgggctacgtgttcaactca

SEQ ID NO: 1496 - DNA, 21 bp, Homo sapiens
ccagacaataaagggaccaaa

SEQ ID NO: 1497 - DNA, 21 bp, Homo sapiens
tccattctcctaggagacaaa

SEQ ID NO: 1498 - DNA, 21 bp, Homo sapiens
cacgtccatcctgtacggcaa

SEQ ID NO: 1499 - DNA, 21 bp, Homo sapiens
caccatcagataagccaccaa

SEQ ID NO: 1500 - DNA, 21 bp, Homo sapiens
taccagcatgacactattata

SEQ ID NO: 1501 - DNA, 21 bp, Homo sapiens
cgggagaagaggtttaattta

SEQ ID NO: 1502 - DNA, 21 bp, Homo sapiens
ctgggcttaatattctttaaa

SEQ ID NO: 1503 - DNA, 21 bp, Homo sapiens
tgggtttatatactaattcta

SEQ ID NO: 1504 - DNA, 21 bp, Homo sapiens
aaggtggaccttgttgctaaa

SEQ ID NO: 1505 - DNA, 21 bp, Homo sapiens
atccctgagtttcaaacagaa

SEQ ID NO: 1506 - DNA, 21 bp, Homo sapiens
caaacagaaacttgcactgaa

SEQ ID NO: 1507 - DNA, 21 bp, Homo sapiens
tccctgagtttcaaacagaaa

SEQ ID NO: 1508 - DNA, 21 bp, Homo sapiens
caggagtgacacaagaacaca

SEQ ID NO: 1509 - DNA, 21 bp, Homo sapiens
ccaataaagaccagcaagcaa

SEQ ID NO: 1510 - DNA, 21 bp, Homo sapiens
ccacgtggtgctgctgctgaa

SEQ ID NO: 1511 - DNA, 21 bp, Homo sapiens
caggccatccgcggaactcga

SEQ ID NO: 1512 - DNA, 21 bp, Homo sapiens
cgcgtggctgctgaactgcaa

SEQ ID NO: 1513 - DNA, 21 bp, Homo sapiens
cacgaccacattgtccgattt

SEQ ID NO: 1514 - DNA, 21 bp, Homo sapiens
atggccaatataaaccaggta

SEQ ID NO: 1515 - DNA, 21 bp, Homo sapiens
ctggcagaatggccaatataa

SEQ ID NO: 1516 - DNA, 21 bp, Homo sapiens
cagaatgtgctcattcgggaa

SEQ ID NO: 1517 - DNA, 21 bp, Homo sapiens
aacctgggctatcacctcaaa

SEQ ID NO: 1518 - DNA, 21 bp, Homo sapiens
cgccatgtcaccactaagtaa

SEQ ID NO: 1519 - DNA, 21 bp, Homo sapiens
caccttcttagacgatatgaa

SEQ ID NO: 1520 - DNA, 21 bp, Homo sapiens
ttgctgagggtcttaaatcaa

SEQ ID NO: 1521 - DNA, 21 bp, Homo sapiens
caagtttaatgccaaatacaa

SEQ ID NO: 1522 - DNA, 21 bp, Homo sapiens
cggcttctcgcacaaggtaaa

SEQ ID NO: 1523 - DNA, 21 bp, Homo sapiens
ccggaactgcatctcttctta

SEQ ID NO: 1524 - DNA, 21 bp, Homo sapiens
ccggaccaatgtgccagacat

SEQ ID NO: 1525 - DNA, 21 bp, Homo sapiens
ccgggatgacagatactgtga

SEQ ID NO: 1526 - DNA, 21 bp, Homo sapiens
cagcatcaaggccatctgtga

SEQ ID NO: 1527 - DNA, 21 bp, Homo sapiens
cgggatgacagatactgtgaa

SEQ ID NO: 1528 - DNA, 21 bp, Homo sapiens
aacgttgttgttgcttgtgaa

SEQ ID NO: 1529 - DNA, 21 bp, Homo sapiens
aagcttggttacacaccttta

SEQ ID NO: 1530 - DNA, 21 bp, Homo sapiens
caggacccttctaaacataaa

SEQ ID NO: 1531 - DNA, 21 bp, Homo sapiens
atcaagctatttgcaacttaa

SEQ ID NO: 1532 - DNA, 21 bp, Homo sapiens
accgtgcaaacgggtgatata

SEQ ID NO: 1533 - DNA, 21 bp, Homo sapiens
caggattatcacgaaagattt

SEQ ID NO: 1534 - DNA, 21 bp, Homo sapiens
cgcatccttagctttacgtaa

SEQ ID NO: 1535 - DNA, 21 bp, Homo sapiens
aaggatcttaacctcaattaa

SEQ ID NO: 1536 - DNA, 21 bp, Homo sapiens
ctagtcgattatttaagcata

SEQ ID NO: 1537 - DNA, 21 bp, Homo sapiens
caccaccttggaccaaagtaa

SEQ ID NO: 1538 - DNA, 21 bp, Homo sapiens
ccgggtgaactacgacgaaga

SEQ ID NO: 1539 - DNA, 21 bp, Homo sapiens
aacgatctcttcagcacatca

SEQ ID NO: 1540 - DNA, 21 bp, Homo sapiens
ccgaaatgccacactggtcaa

SEQ ID NO: 1541 - DNA, 21 bp, Homo sapiens
ctgtatcatcaagatcttcaa

SEQ ID NO: 1542 - DNA, 21 bp, Homo sapiens
cagatccattgtgtggtttaa

SEQ ID NO: 1543 - DNA, 21 bp, Homo sapiens
tacagtgaacttgatctacaa

SEQ ID NO: 1544 - DNA, 21 bp, Homo sapiens
ctgaatgtgaaacatcaataa

SEQ ID NO: 1545 - DNA, 21 bp, Homo sapiens
caggcatgttgtattctataa

SEQ ID NO: 1546 - DNA, 21 bp, Homo sapiens
cggaagattgctcgtgatgaa

SEQ ID NO: 1547 - DNA, 21 bp, Homo sapiens
cacaatcttgagcattcttga

SEQ ID NO: 1548 - DNA, 21 bp, Homo sapiens
atgttgtattctataacacaa

SEQ ID NO: 1549 - DNA, 21 bp, Homo sapiens
cagaaattcttcgtaaggcaa

SEQ ID NO: 1550 - DNA, 21 bp, Homo sapiens
ctgtgtaataatattgaataa

SEQ ID NO: 1551 - DNA, 21 bp, Homo sapiens
caggccaagctgtgtaagtta

SEQ ID NO: 1552 - DNA, 21 bp, Homo sapiens
caagagcacattccaaatcaa

SEQ ID NO: 1553 - DNA, 21 bp, Homo sapiens
taggcagagtataaagtatta

SEQ ID NO: 1554 - DNA, 21 bp, Homo sapiens
cagtgaaggtatggaatatta

SEQ ID NO: 1555 - DNA, 21 bp, Homo sapiens
ccgcattctgatgcttcgcaa

SEQ ID NO: 1556 - DNA, 21 bp, Homo sapiens
aagggcaatggagataaatta

SEQ ID NO: 1557 - DNA, 21 bp, Homo sapiens
caggatcaagatggcccagaa

SEQ ID NO: 1558 - DNA, 21 bp, Homo sapiens
caggaagagaagaatccacaa

SEQ ID NO: 1559 - DNA, 21 bp, Homo sapiens
cagagactaatgaaagttcta

SEQ ID NO: 1560 - DNA, 21 bp, Homo sapiens
ccggtgattgacagtgtttca

SEQ ID NO: 1561 - DNA, 21 bp, Homo sapiens
tccatctaacatcataattaa

SEQ ID NO: 1562 - DNA, 21 bp, Homo sapiens
cagactaagcattgagcataa

SEQ ID NO: 1563 - DNA, 21 bp, Homo sapiens
ccgccaatacctggtgttcca

SEQ ID NO: 1564 - DNA, 21 bp, Homo sapiens
caggaggaacactttgatgca

SEQ ID NO: 1565 - DNA, 21 bp, Homo sapiens
ctggaagttgctcacaattga

SEQ ID NO: 1566 - DNA, 21 bp, Homo sapiens
cagaggaatgtgggctatgta

SEQ ID NO: 1567 - DNA, 21 bp, Homo sapiens
cagggctttaagttagtatta

SEQ ID NO: 1568 - DNA, 21 bp, Homo sapiens
tcccaggtccctcgtatcaaa

SEQ ID NO: 1569 - DNA, 21 bp, Homo sapiens
tcgaaactttataaagggata

SEQ ID NO: 1570 - DNA, 21 bp, Homo sapiens
taggcgtttctgataacacta

SEQ ID NO: 1571 - DNA, 21 bp, Homo sapiens
atcaagaaggctggaacggaa

SEQ ID NO: 1572 - DNA, 21 bp, Homo sapiens
cccactctttgctacaataaa

SEQ ID NO: 1573 - DNA, 21 bp, Homo sapiens
tacaataaatgctgaatgaat

SEQ ID NO: 1574 - DNA, 21 bp, Homo sapiens
aggccaagtcttactttgaaa

SEQ ID NO: 1575 - DNA, 21 bp, Homo sapiens
caccaatcacgtggaagttaa

SEQ ID NO: 1576 - DNA, 21 bp, Homo sapiens
caccctgtttaaagatttcaa

SEQ ID NO: 1577 - DNA, 21 bp, Homo sapiens
aagactactggagcaccgtta

SEQ ID NO: 1578 - DNA, 21 bp, Homo sapiens
ctggagcaccgttaaggacaa

SEQ ID NO: 1579 - DNA, 21 bp, Homo sapiens
caggaacagaggtgccatgca

SEQ ID NO: 1580 - DNA, 21 bp, Homo sapiens
cccaataaagctggacaagaa

SEQ ID NO: 1581 - DNA, 21 bp, Homo sapiens
acacatggaaattggactaaa

SEQ ID NO: 1582 - DNA, 21 bp, Homo sapiens
ctggatggcccggaagaaata

SEQ ID NO: 1583 - DNA, 21 bp, Homo sapiens
cacatggaaattggactaaat

SEQ ID NO: 1584 - DNA, 21 bp, Homo sapiens
caagttgtaaagcatcttgta

SEQ ID NO: 1585 - DNA, 21 bp, Homo sapiens
ctggtcttcaattaccaagaa

SEQ ID NO: 1586 - DNA, 21 bp, Homo sapiens
acccaattaagtcctacttta

SEQ ID NO: 1587 - DNA, 21 bp, Homo sapiens
cagactgaacatgcacatgaa

SEQ ID NO: 1588 - DNA, 21 bp, Homo sapiens
aaggatgactacagacattaa

SEQ ID NO: 1589 - DNA, 21 bp, Homo sapiens
cacactgaacccaattacaca

SEQ ID NO: 1590 - DNA, 21 bp, Homo sapiens
ctgtgtttcagccacactgaa

SEQ ID NO: 1591 - DNA, 21 bp, Homo sapiens
cagctggatcccagggaaata

SEQ ID NO: 1592 - DNA, 21 bp, Homo sapiens
cagccacactgaacccaatta

SEQ ID NO: 1593 - DNA, 21 bp, Homo sapiens
tcagtgtatgttagtacaaat

SEQ ID NO: 1594 - DNA, 21 bp, Homo sapiens
cacattgattaaagatctcaa

SEQ ID NO: 1595 - DNA, 21 bp, Homo sapiens
cagaatttaaataaggctcta

SEQ ID NO: 1596 - DNA, 21 bp, Homo sapiens
aaggacattactagtgactca

SEQ ID NO: 1597 - DNA, 21 bp, Homo sapiens
cagcctctaattggaacggca

SEQ ID NO: 1598 - DNA, 21 bp, Homo sapiens
caaccaaaccctaaattgaaa

SEQ ID NO: 1599 - DNA, 21 bp, Homo sapiens
aaccgtctttggcatttacta

SEQ ID NO: 1600 - DNA, 21 bp, Homo sapiens
acgactgtgcttgtccattat

SEQ ID NO: 1601 - DNA, 21 bp, Homo sapiens
aagaaacttggtaatctgaaa

SEQ ID NO: 1602 - DNA, 21 bp, Homo sapiens
cacgggaagtttagagagcta

SEQ ID NO: 1603 - DNA, 21 bp, Homo sapiens
caggaattcctgtgcatgaaa

SEQ ID NO: 1604 - DNA, 21 bp, Homo sapiens
aaggaactcgatcgtatcatt

SEQ ID NO: 1605 - DNA, 21 bp, Homo sapiens
ctgagggaatccacacttcaa

SEQ ID NO: 1606 - DNA, 21 bp, Homo sapiens
acggttgacgtggacattcca

SEQ ID NO: 1607 - DNA, 21 bp, Homo sapiens
cacccattggtcacctgctaa

SEQ ID NO: 1608 - DNA, 21 bp, Homo sapiens
cacgtgtgctgtgctgagcaa

SEQ ID NO: 1609 - DNA, 21 bp, Homo sapiens
aaggcaaattctttaatcaaa

SEQ ID NO: 1610 - DNA, 21 bp, Homo sapiens
cccacttgtgtcaatattaaa

SEQ ID NO: 1611 - DNA, 21 bp, Homo sapiens
aagctggagctgttaaattta

SEQ ID NO: 1612 - DNA, 21 bp, Homo sapiens
cacgatcctctacaagcttaa

SEQ ID NO: 1613 - DNA, 21 bp, Homo sapiens
ctcagtatgttaaacaggtaa

SEQ ID NO: 1614 - DNA, 21 bp, Homo sapiens
atggttaacctctaactacaa

SEQ ID NO: 1615 - DNA, 21 bp, Homo sapiens
cctgctgatcgtgttcagtaa

SEQ ID NO: 1616 - DNA, 21 bp, Homo sapiens
cccagtggtacttctactaaa

SEQ ID NO: 1617 - DNA, 21 bp, Homo sapiens
agctaagatggtgttatttaa

SEQ ID NO: 1618 - DNA, 21 bp, Homo sapiens
cacaattgtttcattgtttga

SEQ ID NO: 1619 - DNA, 21 bp, Homo sapiens
caggagagagctggccaagat

SEQ ID NO: 1620 - DNA, 21 bp, Homo sapiens
ccctactgtctttgagaacta

SEQ ID NO: 1621 - DNA, 21 bp, Homo sapiens
ccggatcagtgcctttggcta

SEQ ID NO: 1622 - DNA, 21 bp, Homo sapiens
caccatggctgcaatccgaaa

SEQ ID NO: 1623 - DNA, 21 bp, Homo sapiens
caacaggatggtgtcaaggaa

SEQ ID NO: 1624 - DNA, 21 bp, Homo sapiens
cgggcgcacagtgaacctgaa

SEQ ID NO: 1625 - DNA, 21 bp, Homo sapiens
aaaggaaaccattgtgttaaa

SEQ ID NO: 1626 - DNA, 21 bp, Homo sapiens
cactgaataaatagatcagaa

SEQ ID NO: 1627 - DNA, 21 bp, Homo sapiens
aaggaaggttctgaatataga

SEQ ID NO: 1628 - DNA, 21 bp, Homo sapiens
cacagctgggtccctcttcaa

SEQ ID NO: 1629 - DNA, 21 bp, Homo sapiens
ccagcagagcggagttcttta

SEQ ID NO: 1630 - DNA, 21 bp, Homo sapiens
cagagggattctctttcccta

SEQ ID NO: 1631 - DNA, 21 bp, Homo sapiens
cagacctgtaaggacttgcaa

SEQ ID NO: 1632 - DNA, 21 bp, Homo sapiens
accgatattcttatatatgta

SEQ ID NO: 1633 - DNA, 21 bp, Homo sapiens
atctgacatgaaagtcattaa

SEQ ID NO: 1634 - DNA, 21 bp, Homo sapiens
agggaacaacacggtttagaa

SEQ ID NO: 1635 - DNA, 21 bp, Homo sapiens
aacccgagacttggccataaa

SEQ ID NO: 1636 - DNA, 21 bp, Homo sapiens
acggaacaagatgacagccta

SEQ ID NO: 1637 - DNA, 21 bp, Homo sapiens
cccagccaatatacaactgta

SEQ ID NO: 1638 - DNA, 21 bp, Homo sapiens
cagccaatatacaactgtaaa

SEQ ID NO: 1639 - DNA, 21 bp, Homo sapiens
tacgtttggacccaagcttaa

SEQ ID NO: 1640 - DNA, 21 bp, Homo sapiens
taggcacatcgtgttatgaat

SEQ ID NO: 1641 - DNA, 21 bp, Homo sapiens
tcggcacgcgatagatggaaa

SEQ ID NO: 1642 - DNA, 21 bp, Homo sapiens
tcgatggttcagtttcatgaa

SEQ ID NO: 1643 - DNA, 21 bp, Homo sapiens
ctgggtctgcggtatcggaaa

SEQ ID NO: 1644 - DNA, 21 bp, Homo sapiens
cagggcttccatcgatttcta

SEQ ID NO: 1645 - DNA, 21 bp, Homo sapiens
cccggttcggatgggcatgta

SEQ ID NO: 1646 - DNA, 21 bp, Homo sapiens
tcggcagtctctcttcttcta

SEQ ID NO: 1647 - DNA, 21 bp, Homo sapiens
aagggtatggtctctaggcaa

SEQ ID NO: 1648 - DNA, 21 bp, Homo sapiens
cacatttcttacgcaaatgaa

SEQ ID NO: 1649 - DNA, 21 bp, Homo sapiens
atgggtgtacactacgcataa

SEQ ID NO: 1650 - DNA, 21 bp, Homo sapiens
aaccaactttatagtacataa

SEQ ID NO: 1651 - DNA, 21 bp, Homo sapiens
atggaggacatttagaggcaa

SEQ ID NO: 1652 - DNA, 21 bp, Homo sapiens
aaggttcttaatgccatcgaa

SEQ ID NO: 1653 - DNA, 21 bp, Homo sapiens
aacagcgagtcttatgctaaa

SEQ ID NO: 1654 - DNA, 21 bp, Homo sapiens
tcggttgctacgggaacaata

SEQ ID NO: 1655 - DNA, 21 bp, Homo sapiens
ccgctgggaactctcagagaa

SEQ ID NO: 1656 - DNA, 21 bp, Homo sapiens
cacgagttcctgatgcattat

SEQ ID NO: 1657 - DNA, 21 bp, Homo sapiens
ccctcttatcactatggagaa

SEQ ID NO: 1658 - DNA, 21 bp, Homo sapiens
agggaagatgacccacaataa

SEQ ID NO: 1659 - DNA, 21 bp, Homo sapiens
cgcgttcttgacgggaagata

SEQ ID NO: 1660 - DNA, 21 bp, Homo sapiens
ctgaacgagctggatccatta

SEQ ID NO: 1661 - DNA, 21 bp, Homo sapiens
caggtatggtttctagtggta

SEQ ID NO: 1662 - DNA, 21 bp, Homo sapiens
acggagggcatttggaagcta

SEQ ID NO: 1663 - DNA, 21 bp, Homo sapiens
cacggagagccggaacttcaa

SEQ ID NO: 1664 - DNA, 21 bp, Homo sapiens
ccggaaggacactgacaacaa

SEQ ID NO: 1665 - DNA, 21 bp, Homo sapiens
cacggatggcacgaaagccaa

SEQ ID NO: 1666 - DNA, 21 bp, Homo sapiens
cacgttctgttaatttagtaa

SEQ ID NO: 1667 - DNA, 21 bp, Homo sapiens
atggtatgtggtacaaacaaa

SEQ ID NO: 1668 - DNA, 21 bp, Homo sapiens
cacgattaactgtgaaatgta

SEQ ID NO: 1669 - DNA, 21 bp, Homo sapiens
cacgctttgggccttacagaa

SEQ ID NO: 1670 - DNA, 21 bp, Homo sapiens
gagggttatctatacatttaa

SEQ ID NO: 1671 - DNA, 21 bp, Homo sapiens
aaggaaggagggcgtgagaaa

SEQ ID NO: 1672 - DNA, 21 bp, Homo sapiens
agggagcgtgaactttataaa

SEQ ID NO: 1673 - DNA, 21 bp, Homo sapiens
ctcctttaatttatttcttca

SEQ ID NO: 1674 - DNA, 21 bp, Homo sapiens
tccgaaggtgaggagcttgaa

SEQ ID NO: 1675 - DNA, 21 bp, Homo sapiens
caggagccacctctcctttaa

SEQ ID NO: 1676 - DNA, 21 bp, Homo sapiens
caggttatcattgtgaacttt

SEQ ID NO: 1677 - DNA, 21 bp, Homo sapiens
ctgtaattcattgtaattatt

SEQ ID NO: 1678 - DNA, 21 bp, Homo sapiens
gagcagaaattcattgtacaa

SEQ ID NO: 1679 - DNA, 21 bp, Homo sapiens
cagactataggcacaactaca

SEQ ID NO: 1680 - DNA, 21 bp, Homo sapiens
cacgagctgggtggaagtgaa

SEQ ID NO: 1681 - DNA, 21 bp, Homo sapiens
aaccggagtatttctggttaa

SEQ ID NO: 1682 - DNA, 21 bp, Homo sapiens
ctgcgccattgaggtctataa

SEQ ID NO: 1683 - DNA, 21 bp, Homo sapiens
tacgtttatctgattgagcat

SEQ ID NO: 1684 - DNA, 21 bp, Homo sapiens
tacatcttacacggtgtctta

SEQ ID NO: 1685 - DNA, 21 bp, Homo sapiens
ttggcttatacgcgcagtgta

SEQ ID NO: 1686 - DNA, 21 bp, Homo sapiens
cacttattcattagtaattta

SEQ ID NO: 1687 - DNA, 21 bp, Homo sapiens
cacctgtttgttagtttatta

SEQ ID NO: 1688 - DNA, 21 bp, Homo sapiens
aaccatgagtctagtacttaa

SEQ ID NO: 1689 - DNA, 21 bp, Homo sapiens
caagagagagtgagaattcaa

SEQ ID NO: 1690 - DNA, 21 bp, Homo sapiens
caggaagattattacagtcga

SEQ ID NO: 1691 - DNA, 21 bp, Homo sapiens
acccatagcaatggagattga

SEQ ID NO: 1692 - DNA, 21 bp, Homo sapiens
ccgattaattggagattacta

SEQ ID NO: 1693 - DNA, 21 bp, Homo sapiens
aacaatcagattagacactat

SEQ ID NO: 1694 - DNA, 21 bp, Homo sapiens
cagattagacactatgtgtta

SEQ ID NO: 1695 - DNA, 21 bp, Homo sapiens
ctggtttatgctggcccgaat

SEQ ID NO: 1696 - DNA, 21 bp, Homo sapiens
ctcaatgaacgatgaaatgaa

SEQ ID NO: 1697 - DNA, 21 bp, Homo sapiens
aaagggagacgtactactaaa

SEQ ID NO: 1698 - DNA, 21 bp, Homo sapiens
ccgggctgactttaaggctaa

SEQ ID NO: 1699 - DNA, 21 bp, Homo sapiens
ccgcattggaatatacattca

SEQ ID NO: 1700 - DNA, 21 bp, Homo sapiens
cagactgtggactgtaataaa

SEQ ID NO: 1701 - DNA, 21 bp, Homo sapiens
caccagcctctccaagctcaa

SEQ ID NO: 1702 - DNA, 21 bp, Homo sapiens
cccgttctactatgactatga

SEQ ID NO: 1703 - DNA, 21 bp, Homo sapiens
ccacctcatgcttataataaa

SEQ ID NO: 1704 - DNA, 21 bp, Homo sapiens
atcaatgaagatgagccgtaa

SEQ ID NO: 1705 - DNA, 21 bp, Homo sapiens
cccgtgtcatgtgtctgttta

SEQ ID NO: 1706 - DNA, 21 bp, Homo sapiens
cccgatagtgacacatcttca

SEQ ID NO: 1707 - DNA, 21 bp, Homo sapiens
caccaacattgcagccggcaa

SEQ ID NO: 1708 - DNA, 21 bp, Homo sapiens
tcggaactacctagagggata

SEQ ID NO: 1709 - DNA, 21 bp, Homo sapiens
ccctctttataaagcattata

SEQ ID NO: 1710 - DNA, 21 bp, Homo sapiens
ccggaagacaagctttacaaa

SEQ ID NO: 1711 - DNA, 21 bp, Homo sapiens
ttccctgatgtccttgtttaa

SEQ ID NO: 1712 - DNA, 21 bp, Homo sapiens
cacagatacgtaataatttaa

SEQ ID NO: 1713 - DNA, 21 bp, Homo sapiens
cgggagaagatccaagtacta

SEQ ID NO: 1714 - DNA, 21 bp, Homo sapiens
tccgattctctatgtctttaa

SEQ ID NO: 1715 - DNA, 21 bp, Homo sapiens
aaggatgattggaggacctat

SEQ ID NO: 1716 - DNA, 21 bp, Homo sapiens
aaggtctacttgtactatcaa

SEQ ID NO: 1717 - DNA, 21 bp, Homo sapiens
aacagtatttaaggtttccaa

SEQ ID NO: 1718 - DNA, 21 bp, Homo sapiens
aagaattaccactaccaagaa

SEQ ID NO: 1719 - DNA, 21 bp, Homo sapiens
atctggtgttatcaacttaaa

SEQ ID NO: 1720 - DNA, 21 bp, Homo sapiens
acccgtgaaggcaatgattta

SEQ ID NO: 1721 - DNA, 21 bp, Homo sapiens
caggtctgtcatctcctataa

SEQ ID NO: 1722 - DNA, 21 bp, Homo sapiens
cagcaagatatttgtaaatta

SEQ ID NO: 1723 - DNA, 21 bp, Homo sapiens
taaggtagagtcaattatgaa

SEQ ID NO: 1724 - DNA, 21 bp, Homo sapiens
acccaaattgtgatagcataa

SEQ ID NO: 1725 - DNA, 21 bp, Homo sapiens
gagcttgaatttgaaggtgta

SEQ ID NO: 1726 - DNA, 21 bp, Homo sapiens
atggaggttgatggtaaggta

SEQ ID NO: 1727 - DNA, 21 bp, Homo sapiens
ctggatgtttatttataaaga

SEQ ID NO: 1728 - DNA, 21 bp, Homo sapiens
cagccacagaatattatgtaa

SEQ ID NO: 1729 - DNA, 21 bp, Homo sapiens
cagctggagctgtgtccctta

SEQ ID NO: 1730 - DNA, 21 bp, Homo sapiens
tcctagtgtttgtgaaataaa

SEQ ID NO: 1731 - DNA, 21 bp, Homo sapiens
aaggttcagtttcgtgactta

SEQ ID NO: 1732 - DNA, 21 bp, Homo sapiens
acggccgatgtttacttataa

SEQ ID NO: 1733 - DNA, 21 bp, Homo sapiens
cacagtgacattcaagttcat

SEQ ID NO: 1734 - DNA, 21 bp, Homo sapiens
cagggaagtcctcacaggcaa

SEQ ID NO: 1735 - DNA, 21 bp, Homo sapiens
cagcaagtcacttagatcata

SEQ ID NO: 1736 - DNA, 21 bp, Homo sapiens
cagccagttattcttccatta

SEQ ID NO: 1737 - DNA, 21 bp, Homo sapiens
ctggaccggattgttaattat

SEQ ID NO: 1738 - DNA, 21 bp, Homo sapiens
tagcagcttgtagtattgaaa

SEQ ID NO: 1739 - DNA, 21 bp, Homo sapiens
aaggacatgtgcattacctta

SEQ ID NO: 1740 - DNA, 21 bp, Homo sapiens
gccgctaatcttctaacatta

SEQ ID NO: 1741 - DNA, 21 bp, Homo sapiens
ccgctaatcttctaacattaa

SEQ ID NO: 1742 - DNA, 21 bp, Homo sapiens
caggcactaattgttcttcaa

SEQ ID NO: 1743 - DNA, 21 bp, Homo sapiens
accggtggtgaacataagaaa

SEQ ID NO: 1744 - DNA, 21 bp, Homo sapiens
ccgacagaaactaaccctgta

SEQ ID NO: 1745 - DNA, 21 bp, Homo sapiens
ccggtggtgaacataagaaat

SEQ ID NO: 1746 - DNA, 21 bp, Homo sapiens
aggcgacgtattaaggttcaa

SEQ ID NO: 1747 - DNA, 21 bp, Homo sapiens
tcggatcaacgacacgaccaa

SEQ ID NO: 1748 - DNA, 21 bp, Homo sapiens
cagcccgatcgtttccaagaa

SEQ ID NO: 1749 - DNA, 21 bp, Homo sapiens
tcgggtcatgccactgtccaa

SEQ ID NO: 1750 - DNA, 21 bp, Homo sapiens
caactcggaaattaactataa

SEQ ID NO: 1751 - DNA, 21 bp, Homo sapiens
cagaaatacaacagaagttat

SEQ ID NO: 1752 - DNA, 21 bp, Homo sapiens
cactttattaatataaccata

SEQ ID NO: 1753 - DNA, 21 bp, Homo sapiens
tcgcaaacatagggtaataaa

SEQ ID NO: 1754 - DNA, 21 bp, Homo sapiens
atgaacggactggatagtaaa

SEQ ID NO: 1755 - DNA, 21 bp, Homo sapiens
caggtttactcacgtcatcca

SEQ ID NO: 1756 - DNA, 21 bp, Homo sapiens
tccgacattgaagttgactta

SEQ ID NO: 1757 - DNA, 21 bp, Homo sapiens
ctgggtttcatccatccgaca

SEQ ID NO: 1758 - DNA, 21 bp, Homo sapiens
aagtgggatcgagacatgtaa

SEQ ID NO: 1759 - DNA, 21 bp, Homo sapiens
ttggcttaccataactatgaa

SEQ ID NO: 1760 - DNA, 21 bp, Homo sapiens
atggctatttacctaaagcaa

SEQ ID NO: 1761 - DNA, 21 bp, Homo sapiens
cccactgcatataaatatata

SEQ ID NO: 1762 - DNA, 21 bp, Homo sapiens
cgaggtcttgctcatcaacaa

SEQ ID NO: 1763 - DNA, 21 bp, Homo sapiens
ctctctgattgtcacagataa

SEQ ID NO: 1764 - DNA, 21 bp, Homo sapiens
cccgaacgaaaggatacggta

SEQ ID NO: 1765 - DNA, 21 bp, Homo sapiens
ttcgggatataccaaatacaa

SEQ ID NO: 1766 - DNA, 21 bp, Homo sapiens
gagatccataatactaattaa

SEQ ID NO: 1767 - DNA, 21 bp, Homo sapiens
ttggatgataatgcaggacta

SEQ ID NO: 1768 - DNA, 21 bp, Homo sapiens
atggactaaggtagagacaaa

SEQ ID NO: 1769 - DNA, 21 bp, Homo sapiens
ctctgagtgtttggaaataaa

SEQ ID NO: 1770 - DNA, 21 bp, Homo sapiens
caggattcagctattctggaa

SEQ ID NO: 1771 - DNA, 21 bp, Homo sapiens
ctggacttaagcgaagtcttt

SEQ ID NO: 1772 - DNA, 21 bp, Homo sapiens
aacccattcactacaggtgaa

SEQ ID NO: 1773 - DNA, 21 bp, Homo sapiens
tccgatgaattcattagtctt

SEQ ID NO: 1774 - DNA, 21 bp, Homo sapiens
gaccatcaatacagtcgcata

SEQ ID NO: 1775 - DNA, 21 bp, Homo sapiens
tgcagtaattcttaaggctaa

SEQ ID NO: 1776 - DNA, 21 bp, Homo sapiens
ctgaatattataccagatgaa

SEQ ID NO: 1777 - DNA, 21 bp, Homo sapiens
ccgagtggcagctgacatgtt

SEQ ID NO: 1778 - DNA, 21 bp, Homo sapiens
cagctctgagcagatcatgaa

SEQ ID NO: 1779 - DNA, 21 bp, Homo sapiens
cagggtttcatccaggatcga

SEQ ID NO: 1780 - DNA, 21 bp, Homo sapiens
atcatcagatgtggtctataa

SEQ ID NO: 1781 - DNA, 21 bp, Homo sapiens
ccggctcatcgaagtggacaa

SEQ ID NO: 1782 - DNA, 21 bp, Homo sapiens
cacctgaagtgcaatacgaaa

SEQ ID NO: 1783 - DNA, 21 bp, Homo sapiens
aaccatgaacatctttgtcta

SEQ ID NO: 1784 - DNA, 21 bp, Homo sapiens
ctgaagtgcaatacgaaataa

SEQ ID NO: 1785 - DNA, 21 bp, Homo sapiens
caggccgaagtcatacaggaa

SEQ ID NO: 1786 - DNA, 21 bp, Homo sapiens
ctggaagattatgactagata

SEQ ID NO: 1787 - DNA, 21 bp, Homo sapiens
atgcatgtagtcactttataa

SEQ ID NO: 1788 - DNA, 21 bp, Homo sapiens
ctcctacgatacgctactata

SEQ ID NO: 1789 - DNA, 21 bp, Homo sapiens
agggttatcttagatgtttca

SEQ ID NO: 1790 - DNA, 21 bp, Homo sapiens
aaggccagtatgatttataaa

SEQ ID NO: 1791 - DNA, 21 bp, Homo sapiens
gtggatgactgagtacctgaa

SEQ ID NO: 1792 - DNA, 21 bp, Homo sapiens
ccgggagatagtgatgaagta

SEQ ID NO: 1793 - DNA, 21 bp, Homo sapiens
ctgtggcattattgcattata

SEQ ID NO: 1794 - DNA, 21 bp, Homo sapiens
caggcttaagatttggaataa

SEQ ID NO: 1795 - DNA, 21 bp, Homo sapiens
caagctttcccagaaaggata

SEQ ID NO: 1796 - DNA, 21 bp, Homo sapiens
aaggcggatttgaatctcttt

SEQ ID NO: 1797 - DNA, 21 bp, Homo sapiens
ctgcttgggataaagatgcaa

SEQ ID NO: 1798 - DNA, 21 bp, Homo sapiens
aaagtgcagttcagtaataaa

SEQ ID NO: 1799 - DNA, 21 bp, Homo sapiens
ctcgacatctacaacaaccta

SEQ ID NO: 1800 - DNA, 21 bp, Homo sapiens
cacgatgtaaattattaagca

SEQ ID NO: 1801 - DNA, 21 bp, Homo sapiens
caacgtgaacgcgcaaatgta

SEQ ID NO: 1802 - DNA, 21 bp, Homo sapiens
acggatcacgatgtaaattat

SEQ ID NO: 1803 - DNA, 21 bp, Homo sapiens
tacgatgctgatcatcattga

SEQ ID NO: 1804 - DNA, 21 bp, Homo sapiens
ctgcacttcgagaagaatcaa

SEQ ID NO: 1805 - DNA, 21 bp, Homo sapiens
cagcaccttcctacaacccta

SEQ ID NO: 1806 - DNA, 21 bp, Homo sapiens
tggaatgttcattatcgccaa

SEQ ID NO: 1807 - DNA, 21 bp, Homo sapiens
ttggcctgtttgcaacagcta

SEQ ID NO: 1808 - DNA, 21 bp, Homo sapiens
gcgctacattgtcatctgtaa

SEQ ID NO: 1809 - DNA, 21 bp, Homo sapiens
cgccatgtacatggtcaacaa

SEQ ID NO: 1810 - DNA, 21 bp, Homo sapiens
caagagtgcttgcatctacaa

SEQ ID NO: 1811 - DNA, 21 bp, Homo sapiens
cagccgcaacggcaagagtta

SEQ ID NO: 1812 - DNA, 21 bp, Homo sapiens
tgaacttaacttagagtctaa

SEQ ID NO: 1813 - DNA, 21 bp, Homo sapiens
cagcattccgctgaccatcaa

SEQ ID NO: 1814 - DNA, 21 bp, Homo sapiens
acggcagtccatgacggtgaa

SEQ ID NO: 1815 - DNA, 21 bp, Homo sapiens
tggctgcttgatgaaggacaa

SEQ ID NO: 1816 - DNA, 21 bp, Homo sapiens
cagcagcgaagaggtggagaa

SEQ ID NO: 1817 - DNA, 21 bp, Homo sapiens
ctcaatgtctgcagcagcgaa

SEQ ID NO: 1818 - DNA, 21 bp, Homo sapiens
caagcaggtggcagaagtgaa

SEQ ID NO: 1819 - DNA, 21 bp, Homo sapiens
atgagttgatgtctccggtaa

SEQ ID NO: 1820 - DNA, 21 bp, Homo sapiens
gccctgggtttctttaatcta

SEQ ID NO: 1821 - DNA, 21 bp, Homo sapiens
ctggcaggttagaacctagaa

SEQ ID NO: 1822 - DNA, 21 bp, Homo sapiens
ctgcacggtggcagagatcta

SEQ ID NO: 1823 - DNA, 21 bp, Homo sapiens
gaggagaaatgtctgaagtaa

SEQ ID NO: 1824 - DNA, 21 bp, Homo sapiens
tcggcaaagaatctactggaa

SEQ ID NO: 1825 - DNA, 21 bp, Homo sapiens
ccacacttaaggagaacataa

SEQ ID NO: 1826 - DNA, 21 bp, Homo sapiens
ccgaggagcaggagtgctcaa

SEQ ID NO: 1827 - DNA, 21 bp, Homo sapiens
aaggtggttctttagatcaca

SEQ ID NO: 1828 - DNA, 21 bp, Homo sapiens
caacatgaaggtggccattaa

SEQ ID NO: 1829 - DNA, 21 bp, Homo sapiens
ctggtaagcgactgtcatcaa

SEQ ID NO: 1830 - DNA, 21 bp, Homo sapiens
cagccgtgctgttaaaccaaa

SEQ ID NO: 1831 - DNA, 21 bp, Homo sapiens
gacgctagacagataagttta

SEQ ID NO: 1832 - DNA, 21 bp, Homo sapiens
ctgaccatctgtgactataaa

SEQ ID NO: 1833 - DNA, 21 bp, Homo sapiens
atgctcggaaataaagcccaa

SEQ ID NO: 1834 - DNA, 21 bp, Homo sapiens
ccgaatctcaatgtacataga

SEQ ID NO: 1835 - DNA, 21 bp, Homo sapiens
aacgctggaaatggacctcga

SEQ ID NO: 1836 - DNA, 21 bp, Homo sapiens
acggagaaaggtggactggaa

SEQ ID NO: 1837 - DNA, 21 bp, Homo sapiens
cccgctaacgctggaaatgga

SEQ ID NO: 1838 - DNA, 21 bp, Homo sapiens
cagccatgaactacccgctaa

SEQ ID NO: 1839 - DNA, 21 bp, Homo sapiens
tccagaaatattgctgttcaa

SEQ ID NO: 1840 - DNA, 21 bp, Homo sapiens
accattatctctattcttaaa

SEQ ID NO: 1841 - DNA, 21 bp, Homo sapiens
aaagggcttctttgcagtcta

SEQ ID NO: 1842 - DNA, 21 bp, Homo sapiens
cagctatattgtgttcaccta

SEQ ID NO: 1843 - DNA, 21 bp, Homo sapiens
ctggctcaagttcgtctctga

SEQ ID NO: 1844 - DNA, 21 bp, Homo sapiens
aaggactatggccacattcaa

SEQ ID NO: 1845 - DNA, 21 bp, Homo sapiens
cccagctggtttggagttcaa

SEQ ID NO: 1846 - DNA, 21 bp, Homo sapiens
ccgccatttctgagccagaaa

SEQ ID NO: 1847 - DNA, 21 bp, Homo sapiens
ctgtctaaagatatcactcaa

SEQ ID NO: 1848 - DNA, 21 bp, Homo sapiens
caggagatacctcaaggtaga

SEQ ID NO: 1849 - DNA, 21 bp, Homo sapiens
cccggacgaccatgagagata

SEQ ID NO: 1850 - DNA, 21 bp, Homo sapiens
cagcatttatcaagtcttaca

SEQ ID NO: 1851 - DNA, 21 bp, Homo sapiens
ccggacgaccatgagagataa

SEQ ID NO: 1852 - DNA, 21 bp, Homo sapiens
accgtgctgtgcgccaactaa

SEQ ID NO: 1853 - DNA, 21 bp, Homo sapiens
caggtagacatgtggagtcaa

SEQ ID NO: 1854 - DNA, 21 bp, Homo sapiens
taggaaagacatgtaagagca

SEQ ID NO: 1855 - DNA, 21 bp, Homo sapiens
ctgagtgaacagcatgattta

SEQ ID NO: 1856 - DNA, 21 bp, Homo sapiens
acagatatgatgtaaagtgaa

SEQ ID NO: 1857 - DNA, 21 bp, Homo sapiens
accaatttatgtaaccagtat

SEQ ID NO: 1858 - DNA, 21 bp, Homo sapiens
cactgaatgatagtcatttaa

SEQ ID NO: 1859 - DNA, 21 bp, Homo sapiens
gcggcagacattaaaggtaca

SEQ ID NO: 1860 - DNA, 21 bp, Homo sapiens
cagctacgccggacaatagaa

SEQ ID NO: 1861 - DNA, 21 bp, Homo sapiens
ccatatgagcattgtaattaa

SEQ ID NO: 1862 - DNA, 21 bp, Homo sapiens
aagctctaaattgatgtgcta

SEQ ID NO: 1863 - DNA, 21 bp, Homo sapiens
ctcgtaagtatgtaaaggaaa

SEQ ID NO: 1864 - DNA, 21 bp, Homo sapiens
aagcaccgaagcgaaacttaa

SEQ ID NO: 1865 - DNA, 21 bp, Homo sapiens
cccagggttaacgagaaacta

SEQ ID NO: 1866 - DNA, 21 bp, Homo sapiens
cagacgttgtctataaatgaa

SEQ ID NO: 1867 - DNA, 21 bp, Homo sapiens
cagggttaacgagaaactaca

SEQ ID NO: 1868 - DNA, 21 bp, Homo sapiens
aggaatcgtgtttcaattgta

SEQ ID NO: 1869 - DNA, 21 bp, Homo sapiens
tacgtactccagaacatttaa

SEQ ID NO: 1870 - DNA, 21 bp, Homo sapiens
ttggaggaatatcgtaggtaa

SEQ ID NO: 1871 - DNA, 21 bp, Homo sapiens
cagcgtttgtgtatcgggcaa

SEQ ID NO: 1872 - DNA, 21 bp, Homo sapiens
caggacacaattacaactaaa

SEQ ID NO: 1873 - DNA, 21 bp, Homo sapiens
aaccagaaccttgacatctat

SEQ ID NO: 1874 - DNA, 21 bp, Homo sapiens
cacaaatgtcgtgttcagcaa

SEQ ID NO: 1875 - DNA, 21 bp, Homo sapiens
cagattatagtgtttccagaa

SEQ ID NO: 1876 - DNA, 21 bp, Homo sapiens
atgcgattggtctcaagctaa

SEQ ID NO: 1877 - DNA, 21 bp, Homo sapiens
caggctttggccagtgaacaa

SEQ ID NO: 1878 - DNA, 21 bp, Homo sapiens
cacggtcactttcaacattaa

SEQ ID NO: 1879 - DNA, 21 bp, Homo sapiens
cgccaacttggagctcatcaa

SEQ ID NO: 1880 - DNA, 21 bp, Homo sapiens
aacctgaaacatcgtcttgaa

SEQ ID NO: 1881 - DNA, 21 bp, Homo sapiens
ctgggtggccaagaacaccaa

SEQ ID NO: 1882 - DNA, 21 bp, Homo sapiens
tcaccagactctataaataaa

SEQ ID NO: 1883 - DNA, 21 bp, Homo sapiens
acggtcatcaccaaccaggaa

SEQ ID NO: 1884 - DNA, 21 bp, Homo sapiens
cccgggaattaaaggcaccaa

SEQ ID NO: 1885 - DNA, 21 bp, Homo sapiens
cagaagtgccatgctcagaaa

SEQ ID NO: 1886 - DNA, 21 bp, Homo sapiens
caccaacatgaacaacaatta

SEQ ID NO: 1887 - DNA, 21 bp, Homo sapiens
ccgggatatgactgaggtgat

SEQ ID NO: 1888 - DNA, 21 bp, Homo sapiens
accctggcatgtcactattaa

SEQ ID NO: 1889 - DNA, 21 bp, Homo sapiens
cagagagatcctgaacatcaa

SEQ ID NO: 1890 - DNA, 21 bp, Homo sapiens
cccagttatgaaattaataaa

SEQ ID NO: 1891 - DNA, 21 bp, Homo sapiens
ccgagccgttctctacaatta

SEQ ID NO: 1892 - DNA, 21 bp, Homo sapiens
cacggagaagcgaatggacaa

SEQ ID NO: 1893 - DNA, 21 bp, Homo sapiens
cacggtcatcgctgtgcatta

SEQ ID NO: 1894 - DNA, 21 bp, Homo sapiens
taggaacaccctcatcatcta

SEQ ID NO: 1895 - DNA, 21 bp, Homo sapiens
aaccctgtacgactactacaa

SEQ ID NO: 1896 - DNA, 21 bp, Homo sapiens
tccagtgttagacaggagcat

SEQ ID NO: 1897 - DNA, 21 bp, Homo sapiens
aacctgggaaagaatatttga

SEQ ID NO: 1898 - DNA, 21 bp, Homo sapiens
aaccctgtacgactactacaa

SEQ ID NO: 1899 - DNA, 21 bp, Homo sapiens
cccgggagtcgctgtggcaaa

SEQ ID NO: 1900 - DNA, 21 bp, Homo sapiens
ccgcgtgatcaacacatccca

SEQ ID NO: 1901 - DNA, 21 bp, Homo sapiens
ccggtacttcacggacatcat

SEQ ID NO: 1902 - DNA, 21 bp, Homo sapiens
ctggtgttctcccaccttgaa

SEQ ID NO: 1903 - DNA, 21 bp, Homo sapiens
cacgcagttatacttcacata

SEQ ID NO: 1904 - DNA, 21 bp, Homo sapiens
aaggattagaacactcattaa

SEQ ID NO: 1905 - DNA, 21 bp, Homo sapiens
accctggtaaatatatttcaa

SEQ ID NO: 1906 - DNA, 21 bp, Homo sapiens
ccgaagattaatcgaccagta

SEQ ID NO: 1907 - DNA, 21 bp, Homo sapiens
aagggataatacatgatcaaa

SEQ ID NO: 1908 - DNA, 21 bp, Homo sapiens
aagctgggatacagcatttaa

SEQ ID NO: 1909 - DNA, 21 bp, Homo sapiens
cacctggtatgcttacattaa

SEQ ID NO: 1910 - DNA, 21 bp, Homo sapiens
atggagtagattgtacattaa

SEQ ID NO: 1911 - DNA, 21 bp, Homo sapiens
atgcacatagtacatgagaaa

SEQ ID NO: 1912 - DNA, 21 bp, Homo sapiens
ctggctacgataagaagcaaa

SEQ ID NO: 1913 - DNA, 21 bp, Homo sapiens
tgggactttaggcatgattaa

SEQ ID NO: 1914 - DNA, 21 bp, Homo sapiens
ctggtccgacttgccatataa

SEQ ID NO: 1915 - DNA, 21 bp, Homo sapiens
caccgtcgtacaagtgaacaa

SEQ ID NO: 1916 - DNA, 21 bp, Homo sapiens
ccgggtgctacgacctcttaa

SEQ ID NO: 1917 - DNA, 21 bp, Homo sapiens
tcggaacaacgtgctgcgata

SEQ ID NO: 1918 - DNA, 21 bp, Homo sapiens
cgggtgctacgacctcttaaa

SEQ ID NO: 1919 - DNA, 21 bp, Homo sapiens
cccaggaacaacgctctgaaa

SEQ ID NO: 1920 - DNA, 21 bp, Homo sapiens
ccggcagtcgttccagtataa

SEQ ID NO: 1921 - DNA, 21 bp, Homo sapiens
cccgaacactattgtacatat

SEQ ID NO: 1922 - DNA, 21 bp, Homo sapiens
tcgaattggctctgaccctta

SEQ ID NO: 1923 - DNA, 21 bp, Homo sapiens
caccatcatgtcttcaccaat

SEQ ID NO: 1924 - DNA, 21 bp, Homo sapiens
ctggcctgcactgctatacaa

SEQ ID NO: 1925 - DNA, 21 bp, Homo sapiens
caccacacttctgcaatttat

SEQ ID NO: 1926 - DNA, 21 bp, Homo sapiens
ccggacatccctgaagatcaa

SEQ ID NO: 1927 - DNA, 21 bp, Homo sapiens
caagatctggttagtcttgat

SEQ ID NO: 1928 - DNA, 21 bp, Homo sapiens
cactaggcaggtaataataaa

SEQ ID NO: 1929 - DNA, 21 bp, Homo sapiens
caggaatgatttcctgaaaga

SEQ ID NO: 1930 - DNA, 21 bp, Homo sapiens
acggtgtgaatcacacatcca

SEQ ID NO: 1931 - DNA, 21 bp, Homo sapiens
atcgggcattatggtaagcaa

SEQ ID NO: 1932 - DNA, 21 bp, Homo sapiens
ttcgataacgacagtaaatca

SEQ ID NO: 1933 - DNA, 21 bp, Homo sapiens
tcggccgtcactatcaaatca

SEQ ID NO: 1934 - DNA, 21 bp, Homo sapiens
ccgcctgttatgaccttctaa

SEQ ID NO: 1935 - DNA, 21 bp, Homo sapiens
ccggcgtgaagtagagagcca

SEQ ID NO: 1936 - DNA, 21 bp, Homo sapiens
ccgcttgttaggttagggtta

SEQ ID NO: 1937 - DNA, 21 bp, Homo sapiens
ctggagagcatccggctcaaa

SEQ ID NO: 1938 - DNA, 21 bp, Homo sapiens
ctcactgtcatcactaataaa

SEQ ID NO: 1939 - DNA, 21 bp, Homo sapiens
aaggaatgaaactgaatgcaa

SEQ ID NO: 1940 - DNA, 21 bp, Homo sapiens
cccaccaatgtgggttccaaa

SEQ ID NO: 1941 - DNA, 21 bp, Homo sapiens
acctttgtcacttgaaaggaa

SEQ ID NO: 1942 - DNA, 21 bp, Homo sapiens
aaccttggtgatgcattacaa

SEQ ID NO: 1943 - DNA, 21 bp, Homo sapiens
ttcctgaacaacgaatgtaaa

SEQ ID NO: 1944 - DNA, 21 bp, Homo sapiens
ctggttgtatcttattagcaa

SEQ ID NO: 1945 - DNA, 21 bp, Homo sapiens
cggcaacttacacacattgaa

SEQ ID NO: 1946 - DNA, 21 bp, Homo sapiens
atgcccgtgtatgttggttta

SEQ ID NO: 1947 - DNA, 21 bp, Homo sapiens
cagggtttcagtccttatcaa

SEQ ID NO: 1948 - DNA, 21 bp, Homo sapiens
aagcctgagatcaataagaaa

SEQ ID NO: 1949 - DNA, 21 bp, Homo sapiens
caggatctctgacatcctgaa

SEQ ID NO: 1950 - DNA, 21 bp, Homo sapiens
cccggaagcaggagatcatta

SEQ ID NO: 1951 - DNA, 21 bp, Homo sapiens
ccggaagcaggagatcattaa

SEQ ID NO: 1952 - DNA, 21 bp, Homo sapiens
caagagtttactcaacaagaa

SEQ ID NO: 1953 - DNA, 21 bp, Homo sapiens
tcccacggaactgctgtcaaa

SEQ ID NO: 1954 - DNA, 21 bp, Homo sapiens
ccggaccatccgcaaatggaa

SEQ ID NO: 1955 - DNA, 21 bp, Homo sapiens
taggatcatcagcaaacacaa

SEQ ID NO: 1956 - DNA, 21 bp, Homo sapiens
cagggacttgtgtactggtta

SEQ ID NO: 1957 - DNA, 21 bp, Homo sapiens
ctggaacactatagacccaga

SEQ ID NO: 1958 - DNA, 21 bp, Homo sapiens
aacggatgctatgaagctcta

SEQ ID NO: 1959 - DNA, 21 bp, Homo sapiens
aacatggtatatcatgaagta

SEQ ID NO: 1960 - DNA, 21 bp, Homo sapiens
cccgagaatactggaacaata

SEQ ID NO: 1961 - DNA, 21 bp, Homo sapiens
tcggcagagatttatccaata

SEQ ID NO: 1962 - DNA, 21 bp, Homo sapiens
ctcattgaacatatgcaagaa

SEQ ID NO: 1963 - DNA, 21 bp, Homo sapiens
tacctcttcccaggacattaa

SEQ ID NO: 1964 - DNA, 21 bp, Homo sapiens
cccagatatactacaactcaa

SEQ ID NO: 1965 - DNA, 21 bp, Homo sapiens
acccaagatatttatcattca

SEQ ID NO: 1966 - DNA, 21 bp, Homo sapiens
ctcaggaaattagataaataa

SEQ ID NO: 1967 - DNA, 21 bp, Homo sapiens
gcgcagatagagacaatctta

SEQ ID NO: 1968 - DNA, 21 bp, Homo sapiens
caggaattaaatcatccctta

SEQ ID NO: 1969 - DNA, 21 bp, Homo sapiens
gacaaagtttaccaaatgaaa

SEQ ID NO: 1970 - DNA, 21 bp, Homo sapiens
aagataatcaacgactatgaa

SEQ ID NO: 1971 - DNA, 21 bp, Homo sapiens
cggagggtcgatcatctatta

SEQ ID NO: 1972 - DNA, 21 bp, Homo sapiens
aagagtctgtgcccaaatcaa

SEQ ID NO: 1973 - DNA, 21 bp, Homo sapiens
cggcatatttgggaacgagaa

SEQ ID NO: 1974 - DNA, 21 bp, Homo sapiens
tagcctaagctgggatctgaa

SEQ ID NO: 1975 - DNA, 21 bp, Homo sapiens
gaggttgatttgctctctaaa

SEQ ID NO: 1976 - DNA, 21 bp, Homo sapiens
tagtgttaagtgtgcagtata

SEQ ID NO: 1977 - DNA, 21 bp, Homo sapiens
tccagtcttcctgacacttta

SEQ ID NO: 1978 - DNA, 21 bp, Homo sapiens
ctggtcaaccgcgaccctaaa

SEQ ID NO: 1979 - DNA, 21 bp, Homo sapiens
tcctgacactttaattaccaa

SEQ ID NO: 1980 - DNA, 21 bp, Homo sapiens
cagccgtgtctattccatcta

SEQ ID NO: 1981 - DNA, 21 bp, Homo sapiens
caccttgaccataaccgtctt

SEQ ID NO: 1982 - DNA, 21 bp, Homo sapiens
cagcagcactccatatctcta

SEQ ID NO: 1983 - DNA, 21 bp, Homo sapiens
cagaagcttgatgactctaaa

SEQ ID NO: 1984 - DNA, 21 bp, Homo sapiens
cagcacgctattaaatccaaa

SEQ ID NO: 1985 - DNA, 21 bp, Homo sapiens
caggtcgttcttatctagaga

SEQ ID NO: 1986 - DNA, 21 bp, Homo sapiens
ctccctttcatgttaatcaaa

SEQ ID NO: 1987 - DNA, 21 bp, Homo sapiens
ttggcgataggtctcacgcaa

SEQ ID NO: 1988 - DNA, 21 bp, Homo sapiens
caggaaagttaaggtatcaat

SEQ ID NO: 1989 - DNA, 21 bp, Homo sapiens
acgggcaataagactctttaa

SEQ ID NO: 1990 - DNA, 21 bp, Homo sapiens
tcggttggcaaacgtccgaaa

SEQ ID NO: 1991 - DNA, 21 bp, Homo sapiens
tccggttaagttgcactcgat

SEQ ID NO: 1992 - DNA, 21 bp, Homo sapiens
cacagcgagttcaaatgtcaa

SEQ ID NO: 1993 - DNA, 21 bp, Homo sapiens
ctcaatcagtattcatattta

SEQ ID NO: 1994 - DNA, 21 bp, Homo sapiens
cccaacctctcccaactataa

SEQ ID NO: 1995 - DNA, 21 bp, Homo sapiens
cagccctcttctgacactaaa

SEQ ID NO: 1996 - DNA, 21 bp, Homo sapiens
caagaacttatttgtacattt

SEQ ID NO: 1997 - DNA, 21 bp, Homo sapiens
caagtggatgatcaagaacaa

SEQ ID NO: 1998 - DNA, 21 bp, Homo sapiens
cacagacatctcagacttcaa

SEQ ID NO: 1999 - DNA, 21 bp, Homo sapiens
atctatttattaagttctcaa

SEQ ID NO: 2000 - DNA, 21 bp, Homo sapiens
accagaattgtgcaaatggaa

SEQ ID NO: 2001 - DNA, 21 bp, Homo sapiens
tggacgaatgtccatcgttaa

SEQ ID NO: 2002 - DNA, 21 bp, Homo sapiens
acgaatgtccatcgttaagaa

SEQ ID NO: 2003 - DNA, 21 bp, Homo sapiens
cacagcgtccctagcagtgaa

SEQ ID NO: 2004 - DNA, 21 bp, Homo sapiens
cccaaactgttcaagaaataa

SEQ ID NO: 2005 - DNA, 21 bp, Homo sapiens
ccgccgggtcgagctgagtaa

SEQ ID NO: 2006 - DNA, 21 bp, Homo sapiens
cccgtgtacactgtcgtgcaa

SEQ ID NO: 2007 - DNA, 21 bp, Homo sapiens
tgggacagaattggatacata

SEQ ID NO: 2008 - DNA, 21 bp, Homo sapiens
gaccatcatcctactgtaata

SEQ ID NO: 2009 - DNA, 21 bp, Homo sapiens
cacaactttaagaggacataa

SEQ ID NO: 2010 - DNA, 21 bp, Homo sapiens
caggaaccacaccacatctaa

SEQ ID NO: 2011 - DNA, 21 bp, Homo sapiens
cacagatggcgtcaatgtgaa

SEQ ID NO: 2012 - DNA, 21 bp, Homo sapiens
ccggtttatcagtaaagagat

SEQ ID NO: 2013 - DNA, 21 bp, Homo sapiens
aacccaagcgttggaactgta

SEQ ID NO: 2014 - DNA, 21 bp, Homo sapiens
cacggacaacacttacaagta

SEQ ID NO: 2015 - DNA, 21 bp, Homo sapiens
gggacagtggataatccttaa

SEQ ID NO: 2016 - DNA, 21 bp, Homo sapiens
ctggagagagttggtttctaa

SEQ ID NO: 2017 - DNA, 21 bp, Homo sapiens
aaggcagaaataattaggcta

SEQ ID NO: 2018 - DNA, 21 bp, Homo sapiens
aagagtgagtatgctcttaaa

SEQ ID NO: 2019 - DNA, 21 bp, Homo sapiens
ctcgatgtaagggatcattat

SEQ ID NO: 2020 - DNA, 21 bp, Homo sapiens
aagggctttcttggtaattta

SEQ ID NO: 2021 - DNA, 21 bp, Homo sapiens
tccacatatgatagtgttata

SEQ ID NO: 2022 - DNA, 21 bp, Homo sapiens
aagcaagaatatactcataaa

SEQ ID NO: 2023 - DNA, 21 bp, Homo sapiens
aaagcagatctgcaaagacaa

SEQ ID NO: 2024 - DNA, 21 bp, Homo sapiens
cttggtctaaaggtaacttta

SEQ ID NO: 2025 - DNA, 21 bp, Homo sapiens
cacagaaattctgtgcactaa

SEQ ID NO: 2026 - DNA, 21 bp, Homo sapiens
ctgagtgtcaagaatgcttca

SEQ ID NO: 2027 - DNA, 21 bp, Homo sapiens
aacctgtatcaagatgggaaa

SEQ ID NO: 2028 - DNA, 21 bp, Homo sapiens
taagatgagctttccatgtaa

SEQ ID NO: 2029 - DNA, 21 bp, Homo sapiens
cccaacaaattccagcttcaa

SEQ ID NO: 2030 - DNA, 21 bp, Homo sapiens
cccgaattaaacctgtatcaa

SEQ ID NO: 2031 - DNA, 21 bp, Homo sapiens
ctcacttattaattctagtaa

SEQ ID NO: 2032 - DNA, 21 bp, Homo sapiens
cacgaggaatatataggtgta

SEQ ID NO: 2033 - DNA, 21 bp, Homo sapiens
tggcacgatatgttaaaccaa

SEQ ID NO: 2034 - DNA, 21 bp, Homo sapiens
caggctatatatggtattaaa

SEQ ID NO: 2035 - DNA, 21 bp, Homo sapiens
caggaaggcctgtacaatgaa

SEQ ID NO: 2036 - DNA, 21 bp, Homo sapiens
cacgctttcagcgaatgacaa

SEQ ID NO: 2037 - DNA, 21 bp, Homo sapiens
ttggttatatttagctccaaa

SEQ ID NO: 2038 - DNA, 21 bp, Homo sapiens
acccaacacatgggacctata

SEQ ID NO: 2039 - DNA, 21 bp, Homo sapiens
cagcactactgcggccacaaa

SEQ ID NO: 2040 - DNA, 21 bp, Homo sapiens
ctggcggttcaacaactccaa

SEQ ID NO: 2041 - DNA, 21 bp, Homo sapiens
ccggcaggatgtactactcat

SEQ ID NO: 2042 - DNA, 21 bp, Homo sapiens
cagggaggatgctgcctccaa

SEQ ID NO: 2043 - DNA, 21 bp, Homo sapiens
tagcactaaattcgagaagca

SEQ ID NO: 2044 - DNA, 21 bp, Homo sapiens
caaatacaatagagccactaa

SEQ ID NO: 2045 - DNA, 21 bp, Homo sapiens
tagctgtgtttcgggatgcaa

SEQ ID NO: 2046 - DNA, 21 bp, Homo sapiens
acccggcaacatcagtttaaa

SEQ ID NO: 2047 - DNA, 21 bp, Homo sapiens
caaagaggtcttcgacaataa

SEQ ID NO: 2048 - DNA, 21 bp, Homo sapiens
acaaatgtctatcaactttaa

SEQ ID NO: 2049 - DNA, 21 bp, Homo sapiens
ccgcgagatggtctagagtca

SEQ ID NO: 2050 - DNA, 21 bp, Homo sapiens
aaagaggtcttcgacaataaa

SEQ ID NO: 2051 - DNA, 21 bp, Homo sapiens
cccgaggtggataacctgaca

SEQ ID NO: 2052 - DNA, 21 bp, Homo sapiens
ctcagaggttcggaagactta

SEQ ID NO: 2053 - DNA, 21 bp, Homo sapiens
cagaataatgaatggactcaa

SEQ ID NO: 2054 - DNA, 21 bp, Homo sapiens
cagcctagacctgtctgacaa

SEQ ID NO: 2055 - DNA, 21 bp, Homo sapiens
gagcaactttcttacactgaa

SEQ ID NO: 2056 - DNA, 21 bp, Homo sapiens
ttcaatcatggacatacttaa

SEQ ID NO: 2057 - DNA, 21 bp, Homo sapiens
cacacaccatatattaacata

SEQ ID NO: 2058 - DNA, 21 bp, Homo sapiens
caccatatattaacatataca

SEQ ID NO: 2059 - DNA, 21 bp, Homo sapiens
aacgaaggaaatatagatcaa

SEQ ID NO: 2060 - DNA, 21 bp, Homo sapiens
accgagtgtgatcctcttcca

SEQ ID NO: 2061 - DNA, 21 bp, Homo sapiens
aggaaatatagatcaaacaaa

SEQ ID NO: 2062 - DNA, 21 bp, Homo sapiens
aaggttggcttgccacctgaa

SEQ ID NO: 2063 - DNA, 21 bp, Homo sapiens
tgggttaagcatgccaattta

SEQ ID NO: 2064 - DNA, 21 bp, Homo sapiens
cagggatgaggtgctataata

SEQ ID NO: 2065 - DNA, 21 bp, Homo sapiens
ctcgagtgactagaccaaata

SEQ ID NO: 2066 - DNA, 21 bp, Homo sapiens
atgatggttcttcaactataa

SEQ ID NO: 2067 - DNA, 21 bp, Homo sapiens
taccattcctatagtacttta

SEQ ID NO: 2068 - DNA, 21 bp, Homo sapiens
cactactgaagtatacgtaaa

SEQ ID NO: 2069 - DNA, 21 bp, Homo sapiens
tacagctgtgttaccgttaaa

SEQ ID NO: 2070 - DNA, 21 bp, Homo sapiens
cacgataagtttactcctcca

SEQ ID NO: 2071 - DNA, 21 bp, Homo sapiens
ctggcgagtctgtaaactaca

SEQ ID NO: 2072 - DNA, 21 bp, Homo sapiens
ctgcaagtgcttgaccctgta

SEQ ID NO: 2073 - DNA, 21 bp, Homo sapiens
cacccttatgccacataatta

SEQ ID NO: 2074 - DNA, 21 bp, Homo sapiens
cagaagcatgctgctgaatta

SEQ ID NO: 2075 - DNA, 21 bp, Homo sapiens
tccaattgattggtaacagaa

SEQ ID NO: 2076 - DNA, 21 bp, Homo sapiens
tagcagtaattacaacatgta

SEQ ID NO: 2077 - DNA, 21 bp, Homo sapiens
atgcatgataccagagcatta

SEQ ID NO: 2078 - DNA, 21 bp, Homo sapiens
agcaatgtaaacgtaactcaa

SEQ ID NO: 2079 - DNA, 21 bp, Homo sapiens
ctggctatgtgtttagagata

SEQ ID NO: 2080 - DNA, 21 bp, Homo sapiens
cagatggagaattacccgaaa

SEQ ID NO: 2081 - DNA, 21 bp, Homo sapiens
tgggattaatttcaacgagaa

SEQ ID NO: 2082 - DNA, 21 bp, Homo sapiens
caacgagaaggcgatccataa

SEQ ID NO: 2083 - DNA, 21 bp, Homo sapiens
ctgcgtctcagcttccaccaa

SEQ ID NO: 2084 - DNA, 21 bp, Homo sapiens
cagctacgtatccatcgtgat

SEQ ID NO: 2085 - DNA, 21 bp, Homo sapiens
aaggaacatcaggcatgctaa

SEQ ID NO: 2086 - DNA, 21 bp, Homo sapiens
ccgcctgtgtatataacgttt

SEQ ID NO: 2087 - DNA, 21 bp, Homo sapiens
cgccttcaactgtaatcacaa

SEQ ID NO: 2088 - DNA, 21 bp, Homo sapiens
caccttctatgtaggcatcta

SEQ ID NO: 2089 - DNA, 21 bp, Homo sapiens
aagcctagcatcccatgtcaa

SEQ ID NO: 2090 - DNA, 21 bp, Homo sapiens
ttgactaactatggaagatta

SEQ ID NO: 2091 - DNA, 21 bp, Homo sapiens
tcgggaaatttctctattaaa

SEQ ID NO: 2092 - DNA, 21 bp, Homo sapiens
caggttatatctcatctttga

SEQ ID NO: 2093 - DNA, 21 bp, Homo sapiens
cacgatggaaacagatgataa

SEQ ID NO: 2094 - DNA, 21 bp, Homo sapiens
caagggtacatttaaattcaa

SEQ ID NO: 2095 - DNA, 21 bp, Homo sapiens
acgcagatttcaggaaattaa

SEQ ID NO: 2096 - DNA, 21 bp, Homo sapiens
tcgagacaagttaaacattaa

SEQ ID NO: 2097 - DNA, 21 bp, Homo sapiens
gagctgcaatctagttaacta

SEQ ID NO: 2098 - DNA, 21 bp, Homo sapiens
ccagggagccttaaacttata

SEQ ID NO: 2099 - DNA, 21 bp, Homo sapiens
ccagagctatatatccttaaa

SEQ ID NO: 2100 - DNA, 21 bp, Homo sapiens
caggaagggcttatgtttaaa

SEQ ID NO: 2101 - DNA, 21 bp, Homo sapiens
ccagaatatgttcaccatcaa

SEQ ID NO: 2102 - DNA, 21 bp, Homo sapiens
cacgtccatcatcaaagtcaa

SEQ ID NO: 2103 - DNA, 21 bp, Homo sapiens
caaagtcaatatactgattaa

SEQ ID NO: 2104 - DNA, 21 bp, Homo sapiens
ctccaccttcttctaattcaa

SEQ ID NO: 2105 - DNA, 21 bp, Homo sapiens
caggatatatttaaatttgca

SEQ ID NO: 2106 - DNA, 21 bp, Homo sapiens
ctggaagatctccaagatcaa

SEQ ID NO: 2107 - DNA, 21 bp, Homo sapiens
caaggtaaccctggtgtttga

SEQ ID NO: 2108 - DNA, 21 bp, Homo sapiens
ccgaactgaccgggagatcaa

SEQ ID NO: 2109 - DNA, 21 bp, Homo sapiens
accctggtgtttgagcatgta

SEQ ID NO: 2110 - DNA, 21 bp, Homo sapiens
aaggtaatccggagtgagcaa

SEQ ID NO: 2111 - DNA, 21 bp, Homo sapiens
ctcttgaaatgtagaattgaa

SEQ ID NO: 2112 - DNA, 21 bp, Homo sapiens
ttggacatagatcagaagcta

SEQ ID NO: 2113 - DNA, 21 bp, Homo sapiens
gaggctttaaggtagctttaa

SEQ ID NO: 2114 - DNA, 21 bp, Homo sapiens
ccggatggctctggacgtgaa

SEQ ID NO: 2115 - DNA, 21 bp, Homo sapiens
cagggcaataaccacactaat

SEQ ID NO: 2116 - DNA, 21 bp, Homo sapiens
ttcgagagcttaagcatccaa

SEQ ID NO: 2117 - DNA, 21 bp, Homo sapiens
ccagctggacagaatattcaa

SEQ ID NO: 2118 - DNA, 21 bp, Homo sapiens
cagaagaaatacgtataccaa

SEQ ID NO: 2119 - DNA, 21 bp, Homo sapiens
cggccagaaggtggctctgaa

SEQ ID NO: 2120 - DNA, 21 bp, Homo sapiens
tgggcacagtttggtccgtta

SEQ ID NO: 2121 - DNA, 21 bp, Homo sapiens
tagggacatgaaggctgctaa

SEQ ID NO: 2122 - DNA, 21 bp, Homo sapiens
aaccgctgcaagggtagtata

SEQ ID NO: 2123 - DNA, 21 bp, Homo sapiens
ctgtaagtaacttcacattaa

SEQ ID NO: 2124 - DNA, 21 bp, Homo sapiens
cacgcatttggtggacccaaa

SEQ ID NO: 2125 - DNA, 21 bp, Homo sapiens
accgacgattcttctactcaa

SEQ ID NO: 2126 - DNA, 21 bp, Homo sapiens
aaagcgttggatgtagcatta

SEQ ID NO: 2127 - DNA, 21 bp, Homo sapiens
taccgtaaatgtccatttata

SEQ ID NO: 2128 - DNA, 21 bp, Homo sapiens
caggtgtgccacattcgctaa

SEQ ID NO: 2129 - DNA, 21 bp, Homo sapiens
cagaaccaaagctcaaataaa

SEQ ID NO: 2130 - DNA, 21 bp, Homo sapiens
cacgccctaagcgcacattca

SEQ ID NO: 2131 - DNA, 21 bp, Homo sapiens
gagaataaagttacccttgta

SEQ ID NO: 2132 - DNA, 21 bp, Homo sapiens
ctggttatggtacagatacaa

SEQ ID NO: 2133 - DNA, 21 bp, Homo sapiens
caccggctttctcgcactata

SEQ ID NO: 2134 - DNA, 21 bp, Homo sapiens
caaggagagaaagatgatcaa

SEQ ID NO: 2135 - DNA, 21 bp, Homo sapiens
gtagtttacactgatcatcaa

SEQ ID NO: 2136 - DNA, 21 bp, Homo sapiens
caggttatagtctccgaatga

SEQ ID NO: 2137 - DNA, 21 bp, Homo sapiens
ctggattatattgcagcatat

SEQ ID NO: 2138 - DNA, 21 bp, Homo sapiens
aagaaagtaatcaatcaaata

SEQ ID NO: 2139 - DNA, 21 bp, Homo sapiens
caagaagtcggtggacaagaa

SEQ ID NO: 2140 - DNA, 21 bp, Homo sapiens
ctcagccttgtttgtactgta

SEQ ID NO: 2141 - DNA, 21 bp, Homo sapiens
ccgagtcacaccagaaagcta

SEQ ID NO: 2142 - DNA, 21 bp, Homo sapiens
cagccgatatcaacacttgta

SEQ ID NO: 2143 - DNA, 21 bp, Homo sapiens
cagccacatcctggctggcaa

SEQ ID NO: 2144 - DNA, 21 bp, Homo sapiens
agccctgacgctggcctataa

SEQ ID NO: 2145 - DNA, 21 bp, Homo sapiens
cccgttatgatctggatctat

SEQ ID NO: 2146 - DNA, 21 bp, Homo sapiens
tcccatgagccttggtatcaa

SEQ ID NO: 2147 - DNA, 21 bp, Homo sapiens
ccgggagaagtcacggatcat

SEQ ID NO: 2148 - DNA, 21 bp, Homo sapiens
ttcgaggtcttggacatcaaa

SEQ ID NO: 2149 - DNA, 21 bp, Homo sapiens
cacgctgagcacgatcctgaa

SEQ ID NO: 2150 - DNA, 21 bp, Homo sapiens
cgccttgagaagcacagttta

SEQ ID NO: 2151 - DNA, 21 bp, Homo sapiens
aagctctttgatgatgatgaa

SEQ ID NO: 2152 - DNA, 21 bp, Homo sapiens
gcgaattaccctaattctcaa

SEQ ID NO: 2153 - DNA, 21 bp, Homo sapiens
aagcacatgtaactagattta

SEQ ID NO: 2154 - DNA, 21 bp, Homo sapiens
cagaacgactttagacaagca

SEQ ID NO: 2155 - DNA, 21 bp, Homo sapiens
ctggtgacatttaaagaatta

SEQ ID NO: 2156 - DNA, 21 bp, Homo sapiens
tcgagctatgatagaagaatt

SEQ ID NO: 2157 - DNA, 21 bp, Homo sapiens
tagctttgtatttataataga

SEQ ID NO: 2158 - DNA, 21 bp, Homo sapiens
cagttaccatcttatattcta

SEQ ID NO: 2159 - DNA, 21 bp, Homo sapiens
caaggtgttcaacgacatgaa

SEQ ID NO: 2160 - DNA, 21 bp, Homo sapiens
ctgacagggatcaagcatgaa

SEQ ID NO: 2161 - DNA, 21 bp, Homo sapiens
cagtaagggaccttcgattaa

SEQ ID NO: 2162 - DNA, 21 bp, Homo sapiens
caagcatgaattgcaagcaaa

SEQ ID NO: 2163 - DNA, 21 bp, Homo sapiens
caccaccatctgtgccggcta

SEQ ID NO: 2164 - DNA, 21 bp, Homo sapiens
cccacaataaaggcttctcaa

SEQ ID NO: 2165 - DNA, 21 bp, Homo sapiens
ccaggactcctcttcctcaaa

SEQ ID NO: 2166 - DNA, 21 bp, Homo sapiens
cccgaggtataaagccaggta

SEQ ID NO: 2167 - DNA, 21 bp, Homo sapiens
cagttccatgtataccaagaa

SEQ ID NO: 2168 - DNA, 21 bp, Homo sapiens
caggacagcagcttccatcta

SEQ ID NO: 2169 - DNA, 21 bp, Homo sapiens
ttgcttcttcttcaagattta

SEQ ID NO: 2170 - DNA, 21 bp, Homo sapiens
caggcatgcaatgctagataa

SEQ ID NO: 2171 - DNA, 21 bp, Homo sapiens
caggacggtcctcgtgaaaga

SEQ ID NO: 2172 - DNA, 21 bp, Homo sapiens
cccgagatgttcatggatgaa

SEQ ID NO: 2173 - DNA, 21 bp, Homo sapiens
ccggaaattcaaggccactta

SEQ ID NO: 2174 - DNA, 21 bp, Homo sapiens
cacggagatgttctgctgcta

SEQ ID NO: 2175 - DNA, 21 bp, Homo sapiens
ctgggaacccaacgacataaa

SEQ ID NO: 2176 - DNA, 21 bp, Homo sapiens
gagggtgttgcacgacatcta

SEQ ID NO: 2177 - DNA, 21 bp, Homo sapiens
atggaccatcctgattatcca

SEQ ID NO: 2178 - DNA, 21 bp, Homo sapiens
ccagaaagcaaacataataaa

SEQ ID NO: 2179 - DNA, 21 bp, Homo sapiens
ctggacttggtttatattgca

SEQ ID NO: 2180 - DNA, 21 bp, Homo sapiens
tcgaaggagccttcacgtaaa

SEQ ID NO: 2181 - DNA, 21 bp, Homo sapiens
cacggccaaattaatttacga

SEQ ID NO: 2182 - DNA, 21 bp, Homo sapiens
ccggtcctgtttgaataacat

SEQ ID NO: 2183 - DNA, 21 bp, Homo sapiens
taccgaggtgatgaaatgcat

SEQ ID NO: 2184 - DNA, 21 bp, Homo sapiens
tccaaggatgttatggagaaa

SEQ ID NO: 2185 - DNA, 21 bp, Homo sapiens
aaggagtgggaggactccaaa

SEQ ID NO: 2186 - DNA, 21 bp, Homo sapiens
tatgaactttatctaaagaaa

SEQ ID NO: 2187 - DNA, 21 bp, Homo sapiens
cagctgctcaataaagtacaa

SEQ ID NO: 2188 - DNA, 21 bp, Homo sapiens
aaggccgaatttataaaggaa

SEQ ID NO: 2189 - DNA, 21 bp, Homo sapiens
taccacagagattgtactata

SEQ ID NO: 2190 - DNA, 21 bp, Homo sapiens
cacagagattgtactatacaa

SEQ ID NO: 2191 - DNA, 21 bp, Homo sapiens
ccggcccttaccaaacctgat

SEQ ID NO: 2192 - DNA, 21 bp, Homo sapiens
agccggcgattagatactgaa

SEQ ID NO: 2193 - DNA, 21 bp, Homo sapiens
tcggagtttgatgtgatcgta

SEQ ID NO: 2194 - DNA, 21 bp, Homo sapiens
ccggagagttctgcatgttga

SEQ ID NO: 2195 - DNA, 21 bp, Homo sapiens
cggagtttgatgtgatcgtaa

SEQ ID NO: 2196 - DNA, 21 bp, Homo sapiens
ctccaatatattgtcatgcat

SEQ ID NO: 2197 - DNA, 21 bp, Homo sapiens
tggctccgaagtggtgatcaa

SEQ ID NO: 2198 - DNA, 21 bp, Homo sapiens
cagcaagacaatgacactgga

SEQ ID NO: 2199 - DNA, 21 bp, Homo sapiens
tacagtcaagaggccgactaa

SEQ ID NO: 2200 - DNA, 21 bp, Homo sapiens
ccggcttggctagtcacatat

SEQ ID NO: 2201 - DNA, 21 bp, Homo sapiens
cacatcattgtcaacacctaa

SEQ ID NO: 2202 - DNA, 21 bp, Homo sapiens
cacgccgacctgattacctaa

SEQ ID NO: 2203 - DNA, 21 bp, Homo sapiens
tccgagtatgccataagttaa

SEQ ID NO: 2204 - DNA, 21 bp, Homo sapiens
caaggtgttattaaactatta

SEQ ID NO: 2205 - DNA, 21 bp, Homo sapiens
cagcctctgtttgaccatgaa

SEQ ID NO: 2206 - DNA, 21 bp, Homo sapiens
cacgggcacctacaacagcaa

SEQ ID NO: 2207 - DNA, 21 bp, Homo sapiens
caggagtggagcgactacaaa

SEQ ID NO: 2208 - DNA, 21 bp, Homo sapiens
aagggctttgaacaatgttta

SEQ ID NO: 2209 - DNA, 21 bp, Homo sapiens
gcggctgtttgaagattacaa

SEQ ID NO: 2210 - DNA, 21 bp, Homo sapiens
aactgtcttagtacaccataa

SEQ ID NO: 2211 - DNA, 21 bp, Homo sapiens
taccgataaatgaacatttaa

SEQ ID NO: 2212 - DNA, 21 bp, Homo sapiens
cccaccttctatctaagacaa

SEQ ID NO: 2213 - DNA, 21 bp, Homo sapiens
ctgaaccttcttctattgcaa

SEQ ID NO: 2214 - DNA, 21 bp, Homo sapiens
ctgaagtatacatttagttaa

SEQ ID NO: 2215 - DNA, 21 bp, Homo sapiens
atcgttcttcctcaacacata

SEQ ID NO: 2216 - DNA, 21 bp, Homo sapiens
ctgagtaacagctaatcttta

SEQ ID NO: 2217 - DNA, 21 bp, Homo sapiens
ccaccacaggtttcaactcaa

SEQ ID NO: 2218 - DNA, 21 bp, Homo sapiens
cggagaatgggaaatactgaa

SEQ ID NO: 2219 - DNA, 21 bp, Homo sapiens
acgctggaatcctgatgatta

SEQ ID NO: 2220 - DNA, 21 bp, Homo sapiens
caggtagtacaagactggaaa

SEQ ID NO: 2221 - DNA, 21 bp, Homo sapiens
cccagggagaaggacagtgaa

SEQ ID NO: 2222 - DNA, 21 bp, Homo sapiens
cagcaagtcatgcgtgaccaa

SEQ ID NO: 2223 - DNA, 21 bp, Homo sapiens
cagctacgtggacgtgactta

SEQ ID NO: 2224 - DNA, 21 bp, Homo sapiens
cacatgaagaatgacgatgaa

SEQ ID NO: 2225 - DNA, 21 bp, Homo sapiens
ccggcacctgtttcaagagaa

SEQ ID NO: 2226 - DNA, 21 bp, Homo sapiens
ccgccaggacatcaccttcta

SEQ ID NO: 2227 - DNA, 21 bp, Homo sapiens
cggctgaagtggaatgctgaa

SEQ ID NO: 2228 - DNA, 21 bp, Homo sapiens
aacaattacaatgaggagaaa

SEQ ID NO: 2229 - DNA, 21 bp, Homo sapiens
caccaatgtctggatagagat

SEQ ID NO: 2230 - DNA, 21 bp, Homo sapiens
ctgctctatctcagtcaccta

SEQ ID NO: 2231 - DNA, 21 bp, Homo sapiens
caccaacctcatctccctgaa

SEQ ID NO: 2232 - DNA, 21 bp, Homo sapiens
ccaccagaaggtggtgttcta

SEQ ID NO: 2233 - DNA, 21 bp, Homo sapiens
cagcgtgccattgatctatat

SEQ ID NO: 2234 - DNA, 21 bp, Homo sapiens
cagggcaatagtatgatgaat

SEQ ID NO: 2235 - DNA, 21 bp, Homo sapiens
ttccataagcttggtgacaaa

SEQ ID NO: 2236 - DNA, 21 bp, Homo sapiens
caggagaagttcggtttagta

SEQ ID NO: 2237 - DNA, 21 bp, Homo sapiens
ccaagaaaccaaagaaatgaa

SEQ ID NO: 2238 - DNA, 21 bp, Homo sapiens
gcgatcatgtcgcacaaacaa

SEQ ID NO: 2239 - DNA, 21 bp, Homo sapiens
aagaaatctgttcatgttaaa

SEQ ID NO: 2240 - DNA, 21 bp, Homo sapiens
aacatctttctgataacatta

SEQ ID NO: 2241 - DNA, 21 bp, Homo sapiens
taggttactgtaagatgttta

SEQ ID NO: 2242 - DNA, 21 bp, Homo sapiens
tcggacaagtacttcgacgaa

SEQ ID NO: 2243 - DNA, 21 bp, Homo sapiens
ctgtaagatgtttaagataaa

SEQ ID NO: 2244 - DNA, 21 bp, Homo sapiens
aagtttgtatgttgcatttaa

SEQ ID NO: 2245 - DNA, 21 bp, Homo sapiens
acgtgtgacttcgtccagtta

SEQ ID NO: 2246 - DNA, 21 bp, Homo sapiens
tgccatcgtgtggaagatcaa

SEQ ID NO: 2247 - DNA, 21 bp, Homo sapiens
ttggaggcttattcatctata

SEQ ID NO: 2248 - DNA, 21 bp, Homo sapiens
tggaggcttattcatctataa

SEQ ID NO: 2249 - DNA, 21 bp, Homo sapiens
cacctttgaccatagaatcaa

SEQ ID NO: 2250 - DNA, 21 bp, Homo sapiens
caggatggccaagaatttgaa

SEQ ID NO: 2251 - DNA, 21 bp, Homo sapiens
accgggatgaagagactatta

SEQ ID NO: 2252 - DNA, 21 bp, Homo sapiens
ccgaatcaagaaactgcccta

SEQ ID NO: 2253 - DNA, 21 bp, Homo sapiens
cagatggaattcatacggaca

SEQ ID NO: 2254 - DNA, 21 bp, Homo sapiens
ctcattggaatcgttactcta

SEQ ID NO: 2255 - DNA, 21 bp, Homo sapiens
caccgagagattaccaataaa

SEQ ID NO: 2256 - DNA, 21 bp, Homo sapiens
aaggatgtgttaaagcatata

SEQ ID NO: 2257 - DNA, 21 bp, Homo sapiens
taagtggactctggttatcaa

SEQ ID NO: 2258 - DNA, 21 bp, Homo sapiens
atccttgttcctgttacaata

SEQ ID NO: 2259 - DNA, 21 bp, Homo sapiens
aagatgtgaattcaagtatca

SEQ ID NO: 2260 - DNA, 21 bp, Homo sapiens
tcagatttacgtctaccctaa

SEQ ID NO: 2261 - DNA, 21 bp, Homo sapiens
caccagaaacataaaggatta

SEQ ID NO: 2262 - DNA, 21 bp, Homo sapiens
ccggtgaatgttattggaatt

SEQ ID NO: 2263 - DNA, 21 bp, Homo sapiens
agcgtggagctggatgatgaa

SEQ ID NO: 2264 - DNA, 21 bp, Homo sapiens
ctggctgaccatgtttcgaat

SEQ ID NO: 2265 - DNA, 21 bp, Homo sapiens
ccagatcaagtgcttcctcaa

SEQ ID NO: 2266 - DNA, 21 bp, Homo sapiens
ccagctcatcgttctcctaaa

SEQ ID NO: 2267 - DNA, 21 bp, Homo sapiens
actggccatcacattaatgaa

SEQ ID NO: 2268 - DNA, 21 bp, Homo sapiens
ctgagtgtgagaagatggaaa

SEQ ID NO: 2269 - DNA, 21 bp, Homo sapiens
cagctccattctttggcataa

SEQ ID NO: 2270 - DNA, 21 bp, Homo sapiens
ttggcataacaggcaactcta

SEQ ID NO: 2271 - DNA, 21 bp, Homo sapiens
ttcctgctgtatggcactgaa

SEQ ID NO: 2272 - DNA, 21 bp, Homo sapiens
aaggtgtctctcagaggaagt

SEQ ID NO: 2273 - DNA, 21 bp, Homo sapiens
ctggtggtttccacattgcta

SEQ ID NO: 2274 - DNA, 21 bp, Homo sapiens
aaacccagcactcaatgacaa

SEQ ID NO: 2275 - DNA, 21 bp, Homo sapiens
aagctagacggtcttcttaaa

SEQ ID NO: 2276 - DNA, 21 bp, Homo sapiens
cacaatgcctatgcccgtgaa

SEQ ID NO: 2277 - DNA, 21 bp, Homo sapiens
ctggctgattgtagcttgtta

SEQ ID NO: 2278 - DNA, 21 bp, Homo sapiens
cccgtgaagaatttacccaca

SEQ ID NO: 2279 - DNA, 21 bp, Homo sapiens
ccgtatttccaacacacgata

SEQ ID NO: 2280 - DNA, 21 bp, Homo sapiens
cacgatagtaaggagcattta

SEQ ID NO: 2281 - DNA, 21 bp, Homo sapiens
aacgtgatgaacgcaccttaa

SEQ ID NO: 2282 - DNA, 21 bp, Homo sapiens
aaagccggtatcagaaccata

SEQ ID NO: 2283 - DNA, 21 bp, Homo sapiens
ctgcaaacctctgaagagtta

SEQ ID NO: 2284 - DNA, 21 bp, Homo sapiens
acccaagctatttatatgtta

SEQ ID NO: 2285 - DNA, 21 bp, Homo sapiens
ctgcattctctttgagtacta

SEQ ID NO: 2286 - DNA, 21 bp, Homo sapiens
cacgaagatctcggtccagaa

SEQ ID NO: 2287 - DNA, 21 bp, Homo sapiens
ctcggtgctcatgtccctgaa

SEQ ID NO: 2288 - DNA, 21 bp, Homo sapiens
cagcgccagagtgaacaagta

SEQ ID NO: 2289 - DNA, 21 bp, Homo sapiens
aagcacgggccatatgaataa

SEQ ID NO: 2290 - DNA, 21 bp, Homo sapiens
cagcgattaataacaggcaaa

SEQ ID NO: 2291 - DNA, 21 bp, Homo sapiens
gacggaagagttgagacctaa

SEQ ID NO: 2292 - DNA, 21 bp, Homo sapiens
ctggatcgactacaagttgaa

SEQ ID NO: 2293 - DNA, 21 bp, Homo sapiens
aggcaacatataggttgtaaa

SEQ ID NO: 2294 - DNA, 21 bp, Homo sapiens
aagggacatattcatttggaa

SEQ ID NO: 2295 - DNA, 21 bp, Homo sapiens
taggtgaggattgattaccta

SEQ ID NO: 2296 - DNA, 21 bp, Homo sapiens
aagatggattatcaagtgtca

SEQ ID NO: 2297 - DNA, 21 bp, Homo sapiens
caccagattacaacaaattta

SEQ ID NO: 2298 - DNA, 21 bp, Homo sapiens
ctcaattagcgttattggcaa

SEQ ID NO: 2299 - DNA, 21 bp, Homo sapiens
ctgcatgagcctggacaagta

SEQ ID NO: 2300 - DNA, 21 bp, Homo sapiens
ctcagtgactgtgttgctaaa

SEQ ID NO: 2301 - DNA, 21 bp, Homo sapiens
ctgatccaatacagcagacaa

SEQ ID NO: 2302 - DNA, 21 bp, Homo sapiens
ctggagtacctacaagcaata

SEQ ID NO: 2303 - DNA, 21 bp, Homo sapiens
ctggtggatagcaacaatatt

SEQ ID NO: 2304 - DNA, 21 bp, Homo sapiens
ccgtatcaggtttgccagtta

SEQ ID NO: 2305 - DNA, 21 bp, Homo sapiens
cacaaatagcgccatcatcaa

SEQ ID NO: 2306 - DNA, 21 bp, Homo sapiens
cgccatcgacgtgaactacaa

SEQ ID NO: 2307 - DNA, 21 bp, Homo sapiens
catggccttcttcgagtttaa

SEQ ID NO: 2308 - DNA, 21 bp, Homo sapiens
cagaagttactccggaagaaa

SEQ ID NO: 2309 - DNA, 21 bp, Homo sapiens
cagggctgagatagccatcaa

SEQ ID NO: 2310 - DNA, 21 bp, Homo sapiens
tggcgagatcagtatccttaa

SEQ ID NO: 2311 - DNA, 21 bp, Homo sapiens
tagaggcacctatgagttaaa

SEQ ID NO: 2312 - DNA, 21 bp, Homo sapiens
agcaccgactatagacattta

SEQ ID NO: 2313 - DNA, 21 bp, Homo sapiens
ccacctgataatgggtatata

SEQ ID NO: 2314 - DNA, 21 bp, Homo sapiens
aaggttggaatggtgtactaa

SEQ ID NO: 2315 - DNA, 21 bp, Homo sapiens
cacctgataatgggtatataa

SEQ ID NO: 2316 - DNA, 21 bp, Homo sapiens
tcccttggaattgcatcccaa

SEQ ID NO: 2317 - DNA, 21 bp, Homo sapiens
gtgggttgactactccaataa

SEQ ID NO: 2318 - DNA, 21 bp, Homo sapiens
ctgcatcaagcaggttcacta

SEQ ID NO: 2319 - DNA, 21 bp, Homo sapiens
cccgaaatcgtagtgcttgta

SEQ ID NO: 2320 - DNA, 21 bp, Homo sapiens
cagaaagactgtgcactacaa

SEQ ID NO: 2321 - DNA, 21 bp, Homo sapiens
cagcctagtagcagtcattaa

SEQ ID NO: 2322 - DNA, 21 bp, Homo sapiens
aagggtgataattgaatgcaa

SEQ ID NO: 2323 - DNA, 21 bp, Homo sapiens
tccgttctctgcgatgacata

SEQ ID NO: 2324 - DNA, 21 bp, Homo sapiens
accgatgagattatgacttca

SEQ ID NO: 2325 - DNA, 21 bp, Homo sapiens
cgcggtgaggctggtattcca

SEQ ID NO: 2326 - DNA, 21 bp, Homo sapiens
ctcaagtctgttaatggacaa

SEQ ID NO: 2327 - DNA, 21 bp, Homo sapiens
cacaccattcatcgaatgcaa

SEQ ID NO: 2328 - DNA, 21 bp, Homo sapiens
cacgttgtccctgagatttaa

SEQ ID NO: 2329 - DNA, 21 bp, Homo sapiens
ctgcttgtatccaagcatata

SEQ ID NO: 2330 - DNA, 21 bp, Homo sapiens
tcccaaggttacttaattcaa

SEQ ID NO: 2331 - DNA, 21 bp, Homo sapiens
tacattcccaaggttacttaa

SEQ ID NO: 2332 - DNA, 21 bp, Homo sapiens
agcggatatagagctagctaa

SEQ ID NO: 2333 - DNA, 21 bp, Homo sapiens
aagggtgatgatggaattcca

SEQ ID NO: 2334 - DNA, 21 bp, Homo sapiens
ccgggtctcaatggaatgaaa

SEQ ID NO: 2335 - DNA, 21 bp, Homo sapiens
ccgggtctacgtggtgaaaga

SEQ ID NO: 2336 - DNA, 21 bp, Homo sapiens
taggtttaagatgaccaatga

SEQ ID NO: 2337 - DNA, 21 bp, Homo sapiens
ccgcacgtgtgatgacctaaa

SEQ ID NO: 2338 - DNA, 21 bp, Homo sapiens
cacactagtatataccattta

SEQ ID NO: 2339 - DNA, 21 bp, Homo sapiens
caccgacagatcagcacatta

SEQ ID NO: 2340 - DNA, 21 bp, Homo sapiens
cagcatgattacaatgtatta

SEQ ID NO: 2341 - DNA, 21 bp, Homo sapiens
aacggtttgccaggagctata

SEQ ID NO: 2342 - DNA, 21 bp, Homo sapiens
cacctcccttgaacaaattta

SEQ ID NO: 2343 - DNA, 21 bp, Homo sapiens
cagggtgacagaggagacaaa

SEQ ID NO: 2344 - DNA, 21 bp, Homo sapiens
caggctctcgaagctcataaa

SEQ ID NO: 2345 - DNA, 21 bp, Homo sapiens
tacggaagtcctggactccaa

SEQ ID NO: 2346 - DNA, 21 bp, Homo sapiens
agcaatcttaaggctctttaa

SEQ ID NO: 2347 - DNA, 21 bp, Homo sapiens
cccagctggcatagcaactaa

SEQ ID NO: 2348 - DNA, 21 bp, Homo sapiens
aagcctgtttctaactatgaa

SEQ ID NO: 2349 - DNA, 21 bp, Homo sapiens
aagggtatttccctccttaaa

SEQ ID NO: 2350 - DNA, 21 bp, Homo sapiens
caggaaggactcaaattggaa

SEQ ID NO: 2351 - DNA, 21 bp, Homo sapiens
ctggatttcaacagctccaaa

SEQ ID NO: 2352 - DNA, 21 bp, Homo sapiens
tcccactgagttcaaattcaa

SEQ ID NO: 2353 - DNA, 21 bp, Homo sapiens
caaggattggttataatataa

SEQ ID NO: 2354 - DNA, 21 bp, Homo sapiens
caggatcacactatcaagaaa

SEQ ID NO: 2355 - DNA, 21 bp, Homo sapiens
atcaatatttattgacttgta

SEQ ID NO: 2356 - DNA, 21 bp, Homo sapiens
gaccagtaatctgataaataa

SEQ ID NO: 2357 - DNA, 21 bp, Homo sapiens
cagctcataattgatgccaaa

SEQ ID NO: 2358 - DNA, 21 bp, Homo sapiens
tggcattattgaagaaataaa

SEQ ID NO: 2359 - DNA, 21 bp, Homo sapiens
accatagtccttctaacaata

SEQ ID NO: 2360 - DNA, 21 bp, Homo sapiens
aaagggattgtaggtagataa

SEQ ID NO: 2361 - DNA, 21 bp, Homo sapiens
aagggtagccctggacttaat

SEQ ID NO: 2362 - DNA, 21 bp, Homo sapiens
taggtagataacatccaatca

SEQ ID NO: 2363 - DNA, 21 bp, Homo sapiens
cccaatagaatcaacaattta

SEQ ID NO: 2364 - DNA, 21 bp, Homo sapiens
cagtagcaccataacgaagta

SEQ ID NO: 2365 - DNA, 21 bp, Homo sapiens
atcctcaagcatacttcctaa

SEQ ID NO: 2366 - DNA, 21 bp, Homo sapiens
aacgaagtagctttaagtgaa

SEQ ID NO: 2367 - DNA, 21 bp, Homo sapiens
tacctggaaactataaactta

SEQ ID NO: 2368 - DNA, 21 bp, Homo sapiens
ctcggagttgtgagcactcta

SEQ ID NO: 2369 - DNA, 21 bp, Homo sapiens
caggctatctggcaataacaa

SEQ ID NO: 2370 - DNA, 21 bp, Homo sapiens
tagtccgttaacactacttaa

SEQ ID NO: 2371 - DNA, 21 bp, Homo sapiens
caccggccagatgcagtgcaa

SEQ ID NO: 2372 - DNA, 21 bp, Homo sapiens
caccattatccgggacttcta

SEQ ID NO: 2373 - DNA, 21 bp, Homo sapiens
caccaccaccaccaccaccaa

SEQ ID NO: 2374 - DNA, 21 bp, Homo sapiens
cacggccaccaaggtcgtcta

SEQ ID NO: 2375 - DNA, 21 bp, Homo sapiens
gccgttggtgggagagacaaa

SEQ ID NO: 2376 - DNA, 21 bp, Homo sapiens
ccgctcttaccctaagtccaa

SEQ ID NO: 2377 - DNA, 21 bp, Homo sapiens
ccgcaacttccctgatctcaa

SEQ ID NO: 2378 - DNA, 21 bp, Homo sapiens
caagggaatgcaagactttaa

SEQ ID NO: 2379 - DNA, 21 bp, Homo sapiens
ccggtggatgcactccttcaa

SEQ ID NO: 2380 - DNA, 21 bp, Homo sapiens
aagactttaattatctccata

SEQ ID NO: 2381 - DNA, 21 bp, Homo sapiens
cagtcctacgatcccaattaa

SEQ ID NO: 2382 - DNA, 21 bp, Homo sapiens
ctgcatggtgagcatacccta

SEQ ID NO: 2383 - DNA, 21 bp, Homo sapiens
tcggtgtatttctactaataa

SEQ ID NO: 2384 - DNA, 21 bp, Homo sapiens
ctggagccaattggatcatta

SEQ ID NO: 2385 - DNA, 21 bp, Homo sapiens
cagccacagattgccacatta

SEQ ID NO: 2386 - DNA, 21 bp, Homo sapiens
ccgcatgcataaagtaagtaa

SEQ ID NO: 2387 - DNA, 21 bp, Homo sapiens
cagccgggtactaccattcta

SEQ ID NO: 2388 - DNA, 21 bp, Homo sapiens
agggcagttgttgcttcttaa

SEQ ID NO: 2389 - DNA, 21 bp, Homo sapiens
ctgcagcttctccataattta

SEQ ID NO: 2390 - DNA, 21 bp, Homo sapiens
caggaaatggattcacattaa

SEQ ID NO: 2391 - DNA, 21 bp, Homo sapiens
caggactgcagtgcaacgcat

SEQ ID NO: 2392 - DNA, 21 bp, Homo sapiens
ccgctacaataccacaaacaa

SEQ ID NO: 2393 - DNA, 21 bp, Homo sapiens
gcgggtggctggtataaataa

SEQ ID NO: 2394 - DNA, 21 bp, Homo sapiens
caggttggtgacagccgccta

SEQ ID NO: 2395 - DNA, 21 bp, Homo sapiens
ctgcagctcgttgaccatgaa

SEQ ID NO: 2396 - DNA, 21 bp, Homo sapiens
aagctctactatgagaatgaa

SEQ ID NO: 2397 - DNA, 21 bp, Homo sapiens
cacggccattgtcatgaccta

SEQ ID NO: 2398 - DNA, 21 bp, Homo sapiens
acggatcagcttccacagcat

SEQ ID NO: 2399 - DNA, 21 bp, Homo sapiens
ctggcacaagttctgcctcaa

SEQ ID NO: 2400 - DNA, 21 bp, Homo sapiens
gagccttgtgctgtcaataaa

SEQ ID NO: 2401 - DNA, 21 bp, Homo sapiens
tacactatttggacactacaa

SEQ ID NO: 2402 - DNA, 21 bp, Homo sapiens
caggatgtaccgagcacttta

SEQ ID NO: 2403 - DNA, 21 bp, Homo sapiens
ctgagtatagttcaacagttt

SEQ ID NO: 2404 - DNA, 21 bp, Homo sapiens
cagcagctaactagagtccta

SEQ ID NO: 2405 - DNA, 21 bp, Homo sapiens
aagcgctgatcttctatttaa

SEQ ID NO: 2406 - DNA, 21 bp, Homo sapiens
aaggagaaatgatgttataaa

SEQ ID NO: 2407 - DNA, 21 bp, Homo sapiens
gaggatcttgatgccaatcta

SEQ ID NO: 2408 - DNA, 21 bp, Homo sapiens
aaggaatggaacattactaaa

SEQ ID NO: 2409 - DNA, 21 bp, Homo sapiens
ctgtttgtgattcgtggacaa

SEQ ID NO: 2410 - DNA, 21 bp, Homo sapiens
atcagcagctttcacgatata

SEQ ID NO: 2411 - DNA, 21 bp, Homo sapiens
cccggaggacctcaccgtgaa

SEQ ID NO: 2412 - DNA, 21 bp, Homo sapiens
ccgggacaagttcgtcatctt

SEQ ID NO: 2413 - DNA, 21 bp, Homo sapiens
tcctcctttgttgtttcttaa

SEQ ID NO: 2414 - DNA, 21 bp, Homo sapiens
ttgttgtttcttaatttggaa

SEQ ID NO: 2415 - DNA, 21 bp, Homo sapiens
cagcggctgctggatgctcta

SEQ ID NO: 2416 - DNA, 21 bp, Homo sapiens
accgcttccgcttcaatgaaa

SEQ ID NO: 2417 - DNA, 21 bp, Homo sapiens
aagattcagatctttgagaaa

SEQ ID NO: 2418 - DNA, 21 bp, Homo sapiens
ccaaataggcatcatcaataa

SEQ ID NO: 2419 - DNA, 21 bp, Homo sapiens
caccaagttggtcaccttcta

SEQ ID NO: 2420 - DNA, 21 bp, Homo sapiens
ctggatgatgagctcatgaaa

SEQ ID NO: 2421 - DNA, 21 bp, Homo sapiens
ctggaagatcatcgagagcta

SEQ ID NO: 2422 - DNA, 21 bp, Homo sapiens
atgagccaagtggcagctaaa

SEQ ID NO: 2423 - DNA, 21 bp, Homo sapiens
atggaaatggactgactttat

SEQ ID NO: 2424 - DNA, 21 bp, Homo sapiens
accctcaacctcgatcaagta

SEQ ID NO: 2425 - DNA, 21 bp, Homo sapiens
tcctataacttcagtattgta

SEQ ID NO: 2426 - DNA, 21 bp, Homo sapiens
ccaggcgatctgcatacttta

SEQ ID NO: 2427 - DNA, 21 bp, Homo sapiens
ctcctgcatcatcaagcagaa

SEQ ID NO: 2428 - DNA, 21 bp, Homo sapiens
caggcgatctgcatactttaa

SEQ ID NO: 2429 - DNA, 21 bp, Homo sapiens
cctcaggagtaccttcaccaa

SEQ ID NO: 2430 - DNA, 21 bp, Homo sapiens
caggagtaccttcaccaacaa

SEQ ID NO: 2431 - DNA, 21 bp, Homo sapiens
agggaacaaagtcgccgtcaa

SEQ ID NO: 2432 - DNA, 21 bp, Homo sapiens
cccaactggtacaaagccaaa

SEQ ID NO: 2433 - DNA, 21 bp, Homo sapiens
tacgcgcctcattaaaccaaa

SEQ ID NO: 2434 - DNA, 21 bp, Homo sapiens
ccggtacagaatgtattgcca

SEQ ID NO: 2435 - DNA, 21 bp, Homo sapiens
cagagtgatgcctgtccttaa

SEQ ID NO: 2436 - DNA, 21 bp, Homo sapiens
atggaagtccctaaagctaaa

SEQ ID NO: 2437 - DNA, 21 bp, Homo sapiens
aagaacttaatttcagtataa

SEQ ID NO: 2438 - DNA, 21 bp, Homo sapiens
cacagttgtgatggttgttaa

SEQ ID NO: 2439 - DNA, 21 bp, Homo sapiens
caagagtaacatgaaaggttt

SEQ ID NO: 2440 - DNA, 21 bp, Homo sapiens
agggctaaaggctgcaacaaa

SEQ ID NO: 2441 - DNA, 21 bp, Homo sapiens
aacacgcaccttggaattgaa

SEQ ID NO: 2442 - DNA, 21 bp, Homo sapiens
cggtctaggatcgaaatgtta

SEQ ID NO: 2443 - DNA, 21 bp, Homo sapiens
ctccctgacgattccactgta

SEQ ID NO: 2444 - DNA, 21 bp, Homo sapiens
ccggtctaggatcgaaatgtt

SEQ ID NO: 2445 - DNA, 21 bp, Homo sapiens
tccctccgaattctcaacata

SEQ ID NO: 2446 - DNA, 21 bp, Homo sapiens
ctggctctgagttataaatta

SEQ ID NO: 2447 - DNA, 21 bp, Homo sapiens
gtggttgttaatttgaagtaa

SEQ ID NO: 2448 - DNA, 21 bp, Homo sapiens
gagctttatcgtggttgttaa

SEQ ID NO: 2449 - DNA, 21 bp, Homo sapiens
atgtaagactttggccgaaat

SEQ ID NO: 2450 - DNA, 21 bp, Homo sapiens
gcacaccaagagcctaatcta

SEQ ID NO: 2451 - DNA, 21 bp, Homo sapiens
taggaaagaatctctatacaa

SEQ ID NO: 2452 - DNA, 21 bp, Homo sapiens
aagaatctctatacaaatgaa

SEQ ID NO: 2453 - DNA, 21 bp, Homo sapiens
caggttgtaagttctacaaat

SEQ ID NO: 2454 - DNA, 21 bp, Homo sapiens
aagagcataatcaaacaggaa

SEQ ID NO: 2455 - DNA, 21 bp, Homo sapiens
taccgcaaacttgatatggaa

SEQ ID NO: 2456 - DNA, 21 bp, Homo sapiens
caacatatcttcgttatgtaa

SEQ ID NO: 2457 - DNA, 21 bp, Homo sapiens
caggatgttgtttgatcttct

SEQ ID NO: 2458 - DNA, 21 bp, Homo sapiens
tgggaggatcctaatgaaata

SEQ ID NO: 2459 - DNA, 21 bp, Homo sapiens
caggcctacaacaaatccaaa

SEQ ID NO: 2460 - DNA, 21 bp, Homo sapiens
cagataatctttaacactaaa

SEQ ID NO: 2461 - DNA, 21 bp, Homo sapiens
caggagattgttgataaggtt

SEQ ID NO: 2462 - DNA, 21 bp, Homo sapiens
ctggaacaaattactacatta

SEQ ID NO: 2463 - DNA, 21 bp, Homo sapiens
ctccctataatcagacattaa

SEQ ID NO: 2464 - DNA, 21 bp, Homo sapiens
aacgatcatgaagcaaataaa

SEQ ID NO: 2465 - DNA, 21 bp, Homo sapiens
cccgttctcttaactcttgga

SEQ ID NO: 2466 - DNA, 21 bp, Homo sapiens
cagcagatctgtggagacaaa

SEQ ID NO: 2467 - DNA, 21 bp, Homo sapiens
aagaagagagtccatatttca

SEQ ID NO: 2468 - DNA, 21 bp, Homo sapiens
aagcatcacttgggattaata

SEQ ID NO: 2469 - DNA, 21 bp, Homo sapiens
cccaaattacgtgtactacaa

SEQ ID NO: 2470 - DNA, 21 bp, Homo sapiens
cagcattatgatgtgggtcaa

SEQ ID NO: 2471 - DNA, 21 bp, Homo sapiens
acagactttacccgaggtaaa

SEQ ID NO: 2472 - DNA, 21 bp, Homo sapiens
gcgaattgtggcagagtgtaa

SEQ ID NO: 2473 - DNA, 21 bp, Homo sapiens
cagtcactgttcgtcactcaa

SEQ ID NO: 2474 - DNA, 21 bp, Homo sapiens
caccctgatgtcgcagcctat

SEQ ID NO: 2475 - DNA, 21 bp, Homo sapiens
cagcatgtaagcaggatttat

SEQ ID NO: 2476 - DNA, 21 bp, Homo sapiens
taccattgtattcactaacta

SEQ ID NO: 2477 - DNA, 21 bp, Homo sapiens
acaggctttaagtgaattcaa

SEQ ID NO: 2478 - DNA, 21 bp, Homo sapiens
cccatgaattgaacaatttaa

SEQ ID NO: 2479 - DNA, 21 bp, Homo sapiens
ctcgctaggcgccctaagcaa

SEQ ID NO: 2480 - DNA, 21 bp, Homo sapiens
cgccattagcatcataaacca

SEQ ID NO: 2481 - DNA, 21 bp, Homo sapiens
cagcgccattagcatcataaa

SEQ ID NO: 2482 - DNA, 21 bp, Homo sapiens
cacctacttgagactcaccaa

SEQ ID NO: 2483 - DNA, 21 bp, Homo sapiens
cagacggaatcgaaacgtgaa

SEQ ID NO: 2484 - DNA, 21 bp, Homo sapiens
cacagtgttgccagagcctta

SEQ ID NO: 2485 - DNA, 21 bp, Homo sapiens
cagcctttcaggaaagatgca

SEQ ID NO: 2486 - DNA, 21 bp, Homo sapiens
ccacagagtataaataaccaa

SEQ ID NO: 2487 - DNA, 21 bp, Homo sapiens
gtccttcttaacagactcaaa

SEQ ID NO: 2488 - DNA, 21 bp, Homo sapiens
cacccgtgtctatgacgcaaa

SEQ ID NO: 2489 - DNA, 21 bp, Homo sapiens
cgagtatatcctgtacaacaa

SEQ ID NO: 2490 - DNA, 21 bp, Homo sapiens
atggatgtctaagcaccgtaa

SEQ ID NO: 2491 - DNA, 21 bp, Homo sapiens
cccgatggaataaatctagca

SEQ ID NO: 2492 - DNA, 21 bp, Homo sapiens
agggctgatgctgtacaggta

SEQ ID NO: 2493 - DNA, 21 bp, Homo sapiens
ccgcagtaatgacacccttta

SEQ ID NO: 2494 - DNA, 21 bp, Homo sapiens
cacgggactagttagctttaa

SEQ ID NO: 2495 - DNA, 21 bp, Homo sapiens
ctgccacatgttcaaagtaca

SEQ ID NO: 2496 - DNA, 21 bp, Homo sapiens
tgggataatgtcattaatata

SEQ ID NO: 2497 - DNA, 21 bp, Homo sapiens
aaggatatattcggatggcaa

SEQ ID NO: 2498 - DNA, 21 bp, Homo sapiens
aggaatctaattatatcgaaa

SEQ ID NO: 2499 - DNA, 21 bp, Homo sapiens
cccagcatgggcagagaaata

SEQ ID NO: 2500 - DNA, 21 bp, Homo sapiens
cgcgttcataactgtcctcaa

SEQ ID NO: 2501 - DNA, 21 bp, Homo sapiens
cggcgccatctcacccatcaa

SEQ ID NO: 2502 - DNA, 21 bp, Homo sapiens
caccgtgaccatcaacatgaa

SEQ ID NO: 2503 - DNA, 21 bp, Homo sapiens
aactcagactagtttagttaa

SEQ ID NO: 2504 - DNA, 21 bp, Homo sapiens
cagactagtttagttaaatga

SEQ ID NO: 2505 - DNA, 21 bp, Homo sapiens
tcagatgtggtaactgttaaa

SEQ ID NO: 2506 - DNA, 21 bp, Homo sapiens
tagagttgcaatcgtaatgta

SEQ ID NO: 2507 - DNA, 21 bp, Homo sapiens
ctccatcaattctgtattcca

SEQ ID NO: 2508 - DNA, 21 bp, Homo sapiens
caggtaatagggacttagcaa

SEQ ID NO: 2509 - DNA, 21 bp, Homo sapiens
ttggttatatcgaaatagtta

SEQ ID NO: 2510 - DNA, 21 bp, Homo sapiens
caggaactgtacggaatatat

SEQ ID NO: 2511 - DNA, 21 bp, Homo sapiens
cacgctgtgcctcatattaat

SEQ ID NO: 2512 - DNA, 21 bp, Homo sapiens
ccagatcattaggacataata

SEQ ID NO: 2513 - DNA, 21 bp, Homo sapiens
acccttcgcatccattctcaa

SEQ ID NO: 2514 - DNA, 21 bp, Homo sapiens
caggctaaggatactaaccaa

SEQ ID NO: 2515 - DNA, 21 bp, Homo sapiens
caggtagagttcctccatcaa

SEQ ID NO: 2516 - DNA, 21 bp, Homo sapiens
aaggaattactcacagaataa

SEQ ID NO: 2517 - DNA, 21 bp, Homo sapiens
caacacggagttctacttgaa

SEQ ID NO: 2518 - DNA, 21 bp, Homo sapiens
caccttcgactgggtcttcaa

SEQ ID NO: 2519 - DNA, 21 bp, Homo sapiens
ccgctttgactataaggacaa

SEQ ID NO: 2520 - DNA, 21 bp, Homo sapiens
tcgggatttcttcctccctaa

SEQ ID NO: 2521 - DNA, 21 bp, Homo sapiens
atgcaaatattccaaactctt

SEQ ID NO: 2522 - DNA, 21 bp, Homo sapiens
cctgatgatgagcacgttgaa

SEQ ID NO: 2523 - DNA, 21 bp, Homo sapiens
cccaagctaggtggcattcat

SEQ ID NO: 2524 - DNA, 21 bp, Homo sapiens
cagcttcttctccaaccctca

SEQ ID NO: 2525 - DNA, 21 bp, Homo sapiens
ccggcgtttctccctcacaaa

SEQ ID NO: 2526 - DNA, 21 bp, Homo sapiens
acgaagttacattagggagaa

SEQ ID NO: 2527 - DNA, 21 bp, Homo sapiens
aactcacaacaaagtgcttaa

SEQ ID NO: 2528 - DNA, 21 bp, Homo sapiens
aagtcagaattcaatattgaa

SEQ ID NO: 2529 - DNA, 21 bp, Homo sapiens
cagcataagcacagccatctt

SEQ ID NO: 2530 - DNA, 21 bp, Homo sapiens
caccattatccgccttatcaa

SEQ ID NO: 2531 - DNA, 21 bp, Homo sapiens
cagcgggtaccaagctgtgaa

SEQ ID NO: 2532 - DNA, 21 bp, Homo sapiens
tcgcggcttcctgatacccaa

SEQ ID NO: 2533 - DNA, 21 bp, Homo sapiens
ccctgacgcaccataatctaa

SEQ ID NO: 2534 - DNA, 21 bp, Homo sapiens
atcaattgtatcttgagttaa

SEQ ID NO: 2535 - DNA, 21 bp, Homo sapiens
tcctatattagtttcctatta

SEQ ID NO: 2536 - DNA, 21 bp, Homo sapiens
cagctgtaaattgtgtgctta

SEQ ID NO: 2537 - DNA, 21 bp, Homo sapiens
ctgggactgcatcttccagta

SEQ ID NO: 2538 - DNA, 21 bp, Homo sapiens
caggtggagacactaacccaa

SEQ ID NO: 2539 - DNA, 21 bp, Homo sapiens
caggacagtgctgccctttga

SEQ ID NO: 2540 - DNA, 21 bp, Homo sapiens
caccttcagagccatcaacta

SEQ ID NO: 2541 - DNA, 21 bp, Homo sapiens
cagggaggctgcagttcccta

SEQ ID NO: 2542 - DNA, 21 bp, Homo sapiens
cagagatggcttccttgttta

SEQ ID NO: 2543 - DNA, 21 bp, Homo sapiens
aaggcggaactgtcactagaa

SEQ ID NO: 2544 - DNA, 21 bp, Homo sapiens
cactagatcatgggatcctaa

SEQ ID NO: 2545 - DNA, 21 bp, Homo sapiens
cagacatggccatatgcataa

SEQ ID NO: 2546 - DNA, 21 bp, Homo sapiens
ccggagtgactctatcaccaa

SEQ ID NO: 2547 - DNA, 21 bp, Homo sapiens
tgagttgaatgtcatacagaa

SEQ ID NO: 2548 - DNA, 21 bp, Homo sapiens
caggctgagggtagcacctaa

SEQ ID NO: 2549 - DNA, 21 bp, Homo sapiens
ctcggactcttgacaaggcaa

SEQ ID NO: 2550 - DNA, 21 bp, Homo sapiens
aagttagagatctgttatata

SEQ ID NO: 2551 - DNA, 21 bp, Homo sapiens
tagggtaaagatgaagcaata

SEQ ID NO: 2552 - DNA, 21 bp, Homo sapiens
tgcaatacttataagacttaa

SEQ ID NO: 2553 - DNA, 21 bp, Homo sapiens
cagcggaagcagcgctctata

SEQ ID NO: 2554 - DNA, 21 bp, Homo sapiens
cacgctgacatgggccctgta

SEQ ID NO: 2555 - DNA, 21 bp, Homo sapiens
ctcgaagatatggaggcccaa

SEQ ID NO: 2556 - DNA, 21 bp, Homo sapiens
ccgcattgtcctggttcccaa

SEQ ID NO: 2557 - DNA, 21 bp, Homo sapiens
tccgttacaaacgaagatcaa

SEQ ID NO: 2558 - DNA, 21 bp, Homo sapiens
tagggaataatcgaacatcta

SEQ ID NO: 2559 - DNA, 21 bp, Homo sapiens
taggtaattggcagattctaa

SEQ ID NO: 2560 - DNA, 21 bp, Homo sapiens
aaggtccttgggagtaataaa

SEQ ID NO: 2561 - DNA, 21 bp, Homo sapiens
aaggataagcagtgtgaacaa

SEQ ID NO: 2562 - DNA, 21 bp, Homo sapiens
aaggattaagtaggatgtcaa

SEQ ID NO: 2563 - DNA, 21 bp, Homo sapiens
tgggaggttatgtttatttga

SEQ ID NO: 2564 - DNA, 21 bp, Homo sapiens
tagagcatgaacatccagtaa

SEQ ID NO: 2565 - DNA, 21 bp, Homo sapiens
acgaagtagaaacaagtgcaa

SEQ ID NO: 2566 - DNA, 21 bp, Homo sapiens
aaggttggccttagtagtcaa

SEQ ID NO: 2567 - DNA, 21 bp, Homo sapiens
caactttctaacaaacattta

SEQ ID NO: 2568 - DNA, 21 bp, Homo sapiens
ttgcctgagaatacagatcaa

SEQ ID NO: 2569 - DNA, 21 bp, Homo sapiens
cagcctctgcctttcattaaa

SEQ ID NO: 2570 - DNA, 21 bp, Homo sapiens
cagatttgacacttactgcta

SEQ ID NO: 2571 - DNA, 21 bp, Homo sapiens
caagaagattgccttggtaaa

SEQ ID NO: 2572 - DNA, 21 bp, Homo sapiens
aagggtgtgcattacatttca

SEQ ID NO: 2573 - DNA, 21 bp, Homo sapiens
aagaaccatattgacagggta

SEQ ID NO: 2574 - DNA, 21 bp, Homo sapiens
ccggtggtgaataacagacta

SEQ ID NO: 2575 - DNA, 21 bp, Homo sapiens
cagcatgtacggaggcaccaa

SEQ ID NO: 2576 - DNA, 21 bp, Homo sapiens
cagccatgttgcacgattaaa

SEQ ID NO: 2577 - DNA, 21 bp, Homo sapiens
tagccactcacataaagttta

SEQ ID NO: 2578 - DNA, 21 bp, Homo sapiens
accgcaaatgtgaattatcaa

SEQ ID NO: 2579 - DNA, 21 bp, Homo sapiens
ctggagggaaagaactatcta

SEQ ID NO: 2580 - DNA, 21 bp, Homo sapiens
atggaggataattgaggctaa

SEQ ID NO: 2581 - DNA, 21 bp, Homo sapiens
caagaattattggtgaacgaa

SEQ ID NO: 2582 - DNA, 21 bp, Homo sapiens
caagttgtactaacatattaa

SEQ ID NO: 2583 - DNA, 21 bp, Homo sapiens
ctgctgggaaatctaaggcaa

SEQ ID NO: 2584 - DNA, 21 bp, Homo sapiens
caccaaagaagagaaagacaa

SEQ ID NO: 2585 - DNA, 21 bp, Homo sapiens
cgcagccaagttcatcaagaa

SEQ ID NO: 2586 - DNA, 21 bp, Homo sapiens
caccaacatctcagccgtgaa

SEQ ID NO: 2587 - DNA, 21 bp, Homo sapiens
ccggcagaagggcacgggcaa

SEQ ID NO: 2588 - DNA, 21 bp, Homo sapiens
cccagagattgtgaactatga

SEQ ID NO: 2589 - DNA, 21 bp, Homo sapiens
ctggatttggttactgtgcca

SEQ ID NO: 2590 - DNA, 21 bp, Homo sapiens
ccagttaaaccagctactcaa

SEQ ID NO: 2591 - DNA, 21 bp, Homo sapiens
aaagtgtatttgttactttaa

SEQ ID NO: 2592 - DNA, 21 bp, Homo sapiens
caacaaagtagaagagctaaa

SEQ ID NO: 2593 - DNA, 21 bp, Homo sapiens
aaagttgataggagacttgta

SEQ ID NO: 2594 - DNA, 21 bp, Homo sapiens
ctcatgtctgttaataaagaa

SEQ ID NO: 2595 - DNA, 21 bp, Homo sapiens
atgactgttcctatactagta

SEQ ID NO: 2596 - DNA, 21 bp, Homo sapiens
acgatttgtatcgtatgatta

SEQ ID NO: 2597 - DNA, 21 bp, Homo sapiens
aacgatttgtatcgtatgatt

SEQ ID NO: 2598 - DNA, 21 bp, Homo sapiens
tagccatatacagacagtata

SEQ ID NO: 2599 - DNA, 21 bp, Homo sapiens
ccgaggagttccagtgatcaa

SEQ ID NO: 2600 - DNA, 21 bp, Homo sapiens
cagcataccaattacccataa

SEQ ID NO: 2601 - DNA, 21 bp, Homo sapiens
tcactgcaatgtcaaagttta

SEQ ID NO: 2602 - DNA, 21 bp, Homo sapiens
cacctgtgtccaagaactcta

SEQ ID NO: 2603 - DNA, 21 bp, Homo sapiens
aggcagcctgctataaagtta

SEQ ID NO: 2604 - DNA, 21 bp, Homo sapiens
tggactcatcttagttctgta

SEQ ID NO: 2605 - DNA, 21 bp, Homo sapiens
ttggtataaattaatttgtta

SEQ ID NO: 2606 - DNA, 21 bp, Homo sapiens
aagttgcaaagtggaattaaa

SEQ ID NO: 2607 - DNA, 21 bp, Homo sapiens
ctcctgttacccgaaacgaaa

SEQ ID NO: 2608 - DNA, 21 bp, Homo sapiens
caccacagaggctatgctaaa

SEQ ID NO: 2609 - DNA, 21 bp, Homo sapiens
cccgaaatacgtggaactcat

SEQ ID NO: 2610 - DNA, 21 bp, Homo sapiens
cagcgacgagcatgacatcaa

SEQ ID NO: 2611 - DNA, 21 bp, Homo sapiens
aagggtttgatgaatagcaca

SEQ ID NO: 2612 - DNA, 21 bp, Homo sapiens
accctgcacatttgattctaa

SEQ ID NO: 2613 - DNA, 21 bp, Homo sapiens
atggactttagtattagccta

SEQ ID NO: 2614 - DNA, 21 bp, Homo sapiens
ctgaatagacagtccatataa

SEQ ID NO: 2615 - DNA, 21 bp, Homo sapiens
cacgtgggaggccgtggagaa

SEQ ID NO: 2616 - DNA, 21 bp, Homo sapiens
aattgttctggttgcctatag

SEQ ID NO: 2617 - DNA, 21 bp, Homo sapiens
cttggtgatttcagcaagcta

SEQ ID NO: 2618 - DNA, 21 bp, Homo sapiens
aaggtggaatgtcatccttac

SEQ ID NO: 2619 - DNA, 21 bp, Homo sapiens
agggagaaccaggaaacggaa

SEQ ID NO: 2620 - DNA, 21 bp, Homo sapiens
cagcttgtatatagagattgt

SEQ ID NO: 2621 - DNA, 21 bp, Homo sapiens
cagctagctgaagagaatgaa

SEQ ID NO: 2622 - DNA, 21 bp, Homo sapiens
aaggaagtgtatcttcataca

SEQ ID NO: 2623 - DNA, 21 bp, Homo sapiens
ccagtttaaagtggattacaa

SEQ ID NO: 2624 - DNA, 21 bp, Homo sapiens
cagcctgtctctcataaagta

SEQ ID NO: 2625 - DNA, 21 bp, Homo sapiens
aacattcctgtgatcacataa

SEQ ID NO: 2626 - DNA, 21 bp, Homo sapiens
tcctcatatgaaataaatgaa

SEQ ID NO: 2627 - DNA, 21 bp, Homo sapiens
atgaaagtctgtagtcttaaa

SEQ ID NO: 2628 - DNA, 21 bp, Homo sapiens
ccggatggttacattgtcaaa

SEQ ID NO: 2629 - DNA, 21 bp, Homo sapiens
ccgggcaatcaaggaacataa

SEQ ID NO: 2630 - DNA, 21 bp, Homo sapiens
cacggtgttccttatgttata

SEQ ID NO: 2631 - DNA, 21 bp, Homo sapiens
ttggttgttgaagtaaccaaa

SEQ ID NO: 2632 - DNA, 21 bp, Homo sapiens
ctgtggttcattgtagtttaa

SEQ ID NO: 2633 - DNA, 21 bp, Homo sapiens
ccggacatgtacagacatcaa

SEQ ID NO: 2634 - DNA, 21 bp, Homo sapiens
agggactattatattaatata

SEQ ID NO: 2635 - DNA, 21 bp, Homo sapiens
tgccttaagagtggagccata

SEQ ID NO: 2636 - DNA, 21 bp, Homo sapiens
gccctagaaggtataaacaaa

SEQ ID NO: 2637 - DNA, 21 bp, Homo sapiens
gcgacatgtaaaccaaattaa

SEQ ID NO: 2638 - DNA, 21 bp, Homo sapiens
gacgtgcgacatgtaaaccaa

SEQ ID NO: 2639 - DNA, 21 bp, Homo sapiens
tgccttgaactgggacataaa

SEQ ID NO: 2640 - DNA, 21 bp, Homo sapiens
ccggagcatctcagcaagcaa

SEQ ID NO: 2641 - DNA, 21 bp, Homo sapiens
ctgataagttacagcttctaa

SEQ ID NO: 2642 - DNA, 21 bp, Homo sapiens
tagaaagagtctgacccttta

SEQ ID NO: 2643 - DNA, 21 bp, Homo sapiens
aacatactaattctatgtcta

SEQ ID NO: 2644 - DNA, 21 bp, Homo sapiens
gcggtcctatttgatgatgaa

SEQ ID NO: 2645 - DNA, 21 bp, Homo sapiens
aaggctctccatcgaaggcaa

SEQ ID NO: 2646 - DNA, 21 bp, Homo sapiens
ccgcctgaaagtacagctgga

SEQ ID NO: 2647 - DNA, 21 bp, Homo sapiens
cagcacgatggtcctacacat

SEQ ID NO: 2648 - DNA, 21 bp, Homo sapiens
cacctttgtaaagaatctgta

SEQ ID NO: 2649 - DNA, 21 bp, Homo sapiens
caggtatggatttaacagtca

SEQ ID NO: 2650 - DNA, 21 bp, Homo sapiens
ctccgggatttatcaactcaa

SEQ ID NO: 2651 - DNA, 21 bp, Homo sapiens
cagggctttggcggagtcaca

SEQ ID NO: 2652 - DNA, 21 bp, Homo sapiens
caggaacttgactgtctttca

SEQ ID NO: 2653 - DNA, 21 bp, Homo sapiens
ttgggagtttatgcaaggtaa

SEQ ID NO: 2654 - DNA, 21 bp, Homo sapiens
cccaatcaagacaaattgtta

SEQ ID NO: 2655 - DNA, 21 bp, Homo sapiens
cacagttaatctggacagata

SEQ ID NO: 2656 - DNA, 21 bp, Homo sapiens
aagaggagagtactcacttta

SEQ ID NO: 2657 - DNA, 21 bp, Homo sapiens
cacagcgattaatgcaatcaa

SEQ ID NO: 2658 - DNA, 21 bp, Homo sapiens
ttggtttatcatcgatgggaa

SEQ ID NO: 2659 - DNA, 21 bp, Homo sapiens
tacctcattattacctttcta

SEQ ID NO: 2660 - DNA, 21 bp, Homo sapiens
ctccagcatcgtctcatgtaa

SEQ ID NO: 2661 - DNA, 21 bp, Homo sapiens
cgggtcaatgactgtatatta

SEQ ID NO: 2662 - DNA, 21 bp, Homo sapiens
acgggttattaacatatttca

SEQ ID NO: 2663 - DNA, 21 bp, Homo sapiens
atgactgtatattacaagtaa

SEQ ID NO: 2664 - DNA, 21 bp, Homo sapiens
aacagtgaaattcaattctaa

SEQ ID NO: 2665 - DNA, 21 bp, Homo sapiens
ccggactaacgtgaagaagta

SEQ ID NO: 2666 - DNA, 21 bp, Homo sapiens
tacgctcgatttgaggccaaa

SEQ ID NO: 2667 - DNA, 21 bp, Homo sapiens
ctcggctgtatgtgcgtagaa

SEQ ID NO: 2668 - DNA, 21 bp, Homo sapiens
ctcgactaacccacgaagtaa

SEQ ID NO: 2669 - DNA, 21 bp, Homo sapiens
atgtaagttattgcatttcaa

SEQ ID NO: 2670 - DNA, 21 bp, Homo sapiens
ctgtatattctggataaataa

SEQ ID NO: 2671 - DNA, 21 bp, Homo sapiens
ctgcttccaatttgctaataa

SEQ ID NO: 2672 - DNA, 21 bp, Homo sapiens
caggagtctaaagcactttaa

SEQ ID NO: 2673 - DNA, 21 bp, Homo sapiens
cagcgaggtagcggtagtgaa

SEQ ID NO: 2674 - DNA, 21 bp, Homo sapiens
ctgggtgtattcgcctatgaa

SEQ ID NO: 2675 - DNA, 21 bp, Homo sapiens
gagcctgagggctaaatttaa

SEQ ID NO: 2676 - DNA, 21 bp, Homo sapiens
aaccagaacttcgccagtcaa

SEQ ID NO: 2677 - DNA, 21 bp, Homo sapiens
ctgcatgatttaagtgcttta

SEQ ID NO: 2678 - DNA, 21 bp, Homo sapiens
ttggtaaagggtgtaatttaa

SEQ ID NO: 2679 - DNA, 21 bp, Homo sapiens
aagccatttgtgtgcctctaa

SEQ ID NO: 2680 - DNA, 21 bp, Homo sapiens
atggagtactttgttatataa

SEQ ID NO: 2681 - DNA, 21 bp, Homo sapiens
aaggaaagttactgagaacaa

SEQ ID NO: 2682 - DNA, 21 bp, Homo sapiens
cagggagaaacagacatcaaa

SEQ ID NO: 2683 - DNA, 21 bp, Homo sapiens
aagggccaccacgttagccaa

SEQ ID NO: 2684 - DNA, 21 bp, Homo sapiens
gaccttgattgtgtgccttaa

SEQ ID NO: 2685 - DNA, 21 bp, Homo sapiens
cagcagagcttataagatcta

SEQ ID NO: 2686 - DNA, 21 bp, Homo sapiens
aagggccaccacgttagccaa

SEQ ID NO: 2687 - DNA, 21 bp, Homo sapiens
aaggaggttcttagcaaattt

SEQ ID NO: 2688 - DNA, 21 bp, Homo sapiens
caggaggtaattgcagacaaa

SEQ ID NO: 2689 - DNA, 21 bp, Homo sapiens
cccgtgattgatgcagataaa

SEQ ID NO: 2690 - DNA, 21 bp, Homo sapiens
caggtgggtgtacattacgaa

SEQ ID NO: 2691 - DNA, 21 bp, Homo sapiens
ttgattaattggcgtaactta

SEQ ID NO: 2692 - DNA, 21 bp, Homo sapiens
cagaacaagcccatgattgaa

SEQ ID NO: 2693 - DNA, 21 bp, Homo sapiens
ctcagtggtgtgtgttgagaa

SEQ ID NO: 2694 - DNA, 21 bp, Homo sapiens
aacaccgggatctatgtttaa

SEQ ID NO: 2695 - DNA, 21 bp, Homo sapiens
accggtggaaatgacaggaaa

SEQ ID NO: 2696 - DNA, 21 bp, Homo sapiens
ctgggattggattatattgaa

SEQ ID NO: 2697 - DNA, 21 bp, Homo sapiens
ccggcagaaggcccagggaaa

SEQ ID NO: 2698 - DNA, 21 bp, Homo sapiens
aaggatcccaattctgggtaa

SEQ ID NO: 2699 - DNA, 21 bp, Homo sapiens
ccgcctggactgcaaagtgat

SEQ ID NO: 2700 - DNA, 21 bp, Homo sapiens
agggatcaaagaagatggtta

SEQ ID NO: 2701 - DNA, 21 bp, Homo sapiens
acactctaactgattacttaa

SEQ ID NO: 2702 - DNA, 21 bp, Homo sapiens
cagtaaagaggcgaagtatta

SEQ ID NO: 2703 - DNA, 21 bp, Homo sapiens
aacaatgacatttatgttaaa

SEQ ID NO: 2704 - DNA, 21 bp, Homo sapiens
atcgggaagtggcgtgttcaa

SEQ ID NO: 2705 - DNA, 21 bp, Homo sapiens
tactgtcttaatagaaggcaa

SEQ ID NO: 2706 - DNA, 21 bp, Homo sapiens
tccctacacgttattggctta

SEQ ID NO: 2707 - DNA, 21 bp, Homo sapiens
atggttaacctgatagaatta

SEQ ID NO: 2708 - DNA, 21 bp, Homo sapiens
acgctaatggttaacctgata

SEQ ID NO: 2709 - DNA, 21 bp, Homo sapiens
ctgaggatagtagttaaataa

SEQ ID NO: 2710 - DNA, 21 bp, Homo sapiens
tcggtgaatgatggaaagcaa

SEQ ID NO: 2711 - DNA, 21 bp, Homo sapiens
cccacggaaggttatagtaaa

SEQ ID NO: 2712 - DNA, 21 bp, Homo sapiens
tcgagagtatcctggctttaa

SEQ ID NO: 2713 - DNA, 21 bp, Homo sapiens
aacacccgacttcctcatgaa

SEQ ID NO: 2714 - DNA, 21 bp, Homo sapiens
tgggaagtttattcctcgaaa

SEQ ID NO: 2715 - DNA, 21 bp, Homo sapiens
ctccctaggatcctttagaaa

SEQ ID NO: 2716 - DNA, 21 bp, Homo sapiens
cggcaggagatgggaagttta

SEQ ID NO: 2717 - DNA, 21 bp, Homo sapiens
taccatggaacgcctaataaa

SEQ ID NO: 2718 - DNA, 21 bp, Homo sapiens
caggcttgcgttattggccta

SEQ ID NO: 2719 - DNA, 21 bp, Homo sapiens
acggattgccagatttatgaa

SEQ ID NO: 2720 - DNA, 21 bp, Homo sapiens
ctcgtgtttattattccttaa

SEQ ID NO: 2721 - DNA, 21 bp, Homo sapiens
ctcagcttatatgaaagtcaa

SEQ ID NO: 2722 - DNA, 21 bp, Homo sapiens
aaggattgtagtcatcctgaa

SEQ ID NO: 2723 - DNA, 21 bp, Homo sapiens
aagatagtattaagtaattaa

SEQ ID NO: 2724 - DNA, 21 bp, Homo sapiens
cagccgtatatggaacataaa

SEQ ID NO: 2725 - DNA, 21 bp, Homo sapiens
atcggtcatattggactatga

SEQ ID NO: 2726 - DNA, 21 bp, Homo sapiens
cacaattaactccgtttccaa

SEQ ID NO: 2727 - DNA, 21 bp, Homo sapiens
gacggtgagtatcaataacaa

SEQ ID NO: 2728 - DNA, 21 bp, Homo sapiens
acggtgagtatcaataacaat

SEQ ID NO: 2729 - DNA, 21 bp, Homo sapiens
cagcatgtcggtggagatcaa

SEQ ID NO: 2730 - DNA, 21 bp, Homo sapiens
aaggatatctatatatctata

SEQ ID NO: 2731 - DNA, 21 bp, Homo sapiens
aaggctctagattatgaacaa

SEQ ID NO: 2732 - DNA, 21 bp, Homo sapiens
ctcactggtgatgatactaaa

SEQ ID NO: 2733 - DNA, 21 bp, Homo sapiens
cagaagaatgactatgaccaa

SEQ ID NO: 2734 - DNA, 21 bp, Homo sapiens
ccgacatgaatcagtaagtaa

SEQ ID NO: 2735 - DNA, 21 bp, Homo sapiens
cagggagatcatgtggatcaa

SEQ ID NO: 2736 - DNA, 21 bp, Homo sapiens
aagggccacggtattcgctta

SEQ ID NO: 2737 - DNA, 21 bp, Homo sapiens
gaggatgtcgctgttgtccaa

SEQ ID NO: 2738 - DNA, 21 bp, Homo sapiens
catgatagtagcataggtcaa

SEQ ID NO: 2739 - DNA, 21 bp, Homo sapiens
aacgagggtaatacaagtgaa

SEQ ID NO: 2740 - DNA, 21 bp, Homo sapiens
tcggatagtaaagaatattat

SEQ ID NO: 2741 - DNA, 21 bp, Homo sapiens
cagccatagaatttagtgtaa

SEQ ID NO: 2742 - DNA, 21 bp, Homo sapiens
tgcgacctattcaatacatta

SEQ ID NO: 2743 - DNA, 21 bp, Homo sapiens
cagcattcaaattatatagaa

SEQ ID NO: 2744 - DNA, 21 bp, Homo sapiens
cccgttgtcatagctatttca

SEQ ID NO: 2745 - DNA, 21 bp, Homo sapiens
cagcttattgcagaactggaa

SEQ ID NO: 2746 - DNA, 21 bp, Homo sapiens
ccacttgaccttgcacatata

SEQ ID NO: 2747 - DNA, 21 bp, Homo sapiens
ccgggaagaagttcaccgcaa

SEQ ID NO: 2748 - DNA, 21 bp, Homo sapiens
gtgggagtcagccaagattta

SEQ ID NO: 2749 - DNA, 21 bp, Homo sapiens
cactgtgggtggagaaataaa

SEQ ID NO: 2750 - DNA, 21 bp, Homo sapiens
gaccaagaagaagcaccttaa

SEQ ID NO: 2751 - DNA, 21 bp, Homo sapiens
cgcgggaaagaccgaaaggaa

SEQ ID NO: 2752 - DNA, 21 bp, Homo sapiens
aaacttagcactttatattta

SEQ ID NO: 2753 - DNA, 21 bp, Homo sapiens
ctggtccaccaccatgttgaa

SEQ ID NO: 2754 - DNA, 21 bp, Homo sapiens
cagcctgagagctccaaggaa

SEQ ID NO: 2755 - DNA, 21 bp, Homo sapiens
ctggctggtgtcctcagataa

SEQ ID NO: 2756 - DNA, 21 bp, Homo sapiens
cacgctaaacatggagaagta

SEQ ID NO: 2757 - DNA, 21 bp, Homo sapiens
ccggatacgagagctcctcta

SEQ ID NO: 2758 - DNA, 21 bp, Homo sapiens
ctgggagatttgggccatgta

SEQ ID NO: 2759 - DNA, 21 bp, Homo sapiens
cccggctaaatggaactgcga

SEQ ID NO: 2760 - DNA, 21 bp, Homo sapiens
ctcctggttacttcatcacaa

SEQ ID NO: 2761 - DNA, 21 bp, Homo sapiens
cagcatatcatatccatttca

SEQ ID NO: 2762 - DNA, 21 bp, Homo sapiens
accaagtatgttcctcctgaa

SEQ ID NO: 2763 - DNA, 21 bp, Homo sapiens
ctcactgaatctgaccaccaa

SEQ ID NO: 2764 - DNA, 21 bp, Homo sapiens
cagatggttatggtgatcaaa

SEQ ID NO: 2765 - DNA, 21 bp, Homo sapiens
caggaccttcgtagcattgca

SEQ ID NO: 2766 - DNA, 21 bp, Homo sapiens
acgctatgagacctcactgaa

SEQ ID NO: 2767 - DNA, 21 bp, Homo sapiens
tccgtgctgttggcaacttta

SEQ ID NO: 2768 - DNA, 21 bp, Homo sapiens
tagggaccaggtagactttaa

SEQ ID NO: 2769 - DNA, 21 bp, Homo sapiens
acccattgggaatgagtttaa

SEQ ID NO: 2770 - DNA, 21 bp, Homo sapiens
ttgagacgagggattatttca

SEQ ID NO: 2771 - DNA, 21 bp, Homo sapiens
gcggatttacgacattaccaa

SEQ ID NO: 2772 - DNA, 21 bp, Homo sapiens
aacgaatggattcctatataa

SEQ ID NO: 2773 - DNA, 21 bp, Homo sapiens
acccgggagattgctgacaaa

SEQ ID NO: 2774 - DNA, 21 bp, Homo sapiens
aggtatcgggctaatcgagaa

SEQ ID NO: 2775 - DNA, 21 bp, Homo sapiens
ctgaacactcattacactaaa

SEQ ID NO: 2776 - DNA, 21 bp, Homo sapiens
ccgggacatcttgaccattga

SEQ ID NO: 2777 - DNA, 21 bp, Homo sapiens
ctggacgtcagcagtaattca

SEQ ID NO: 2778 - DNA, 21 bp, Homo sapiens
tagacacagatcatagctcta

SEQ ID NO: 2779 - DNA, 21 bp, Homo sapiens
cagaagcatgcgactttcata

SEQ ID NO: 2780 - DNA, 21 bp, Homo sapiens
ttgcaggaagccgactgtaaa

SEQ ID NO: 2781 - DNA, 21 bp, Homo sapiens
ctggttcacaaagagcattaa

SEQ ID NO: 2782 - DNA, 21 bp, Homo sapiens
ccgggtggactttgcctataa

SEQ ID NO: 2783 - DNA, 21 bp, Homo sapiens
caacgttacaacggaagtaaa

SEQ ID NO: 2784 - DNA, 21 bp, Homo sapiens
aagctggaagatggccctaaa

SEQ ID NO: 2785 - DNA, 21 bp, Homo sapiens
ctgggtcttggataaactgaa

SEQ ID NO: 2786 - DNA, 21 bp, Homo sapiens
ctggttaatgataacaatgca

SEQ ID NO: 2787 - DNA, 21 bp, Homo sapiens
ctggatcatggcatttaaata

SEQ ID NO: 2788 - DNA, 21 bp, Homo sapiens
atcctggatcatggcatttaa

SEQ ID NO: 2789 - DNA, 21 bp, Homo sapiens
ctggttcgacaagttcaaata

SEQ ID NO: 2790 - DNA, 21 bp, Homo sapiens
ccggctgaacgtgctggagaa

SEQ ID NO: 2791 - DNA, 21 bp, Homo sapiens
caccctgttgtggctctataa

SEQ ID NO: 2792 - DNA, 21 bp, Homo sapiens
atggcccagtttgatgctaaa

SEQ ID NO: 2793 - DNA, 21 bp, Homo sapiens
tgccgtttctttcaatattta

SEQ ID NO: 2794 - DNA, 21 bp, Homo sapiens
ccgcgccatcatggacaagaa

SEQ ID NO: 2795 - DNA, 21 bp, Homo sapiens
caccatacatgtgcagctgaa

SEQ ID NO: 2796 - DNA, 21 bp, Homo sapiens
tacaatgttctttgtctcaaa

SEQ ID NO: 2797 - DNA, 21 bp, Homo sapiens
cccggagaagctgtctgagaa

SEQ ID NO: 2798 - DNA, 21 bp, Homo sapiens
cacgtgtatagtatctgtata

SEQ ID NO: 2799 - DNA, 21 bp, Homo sapiens
ctggagagacttactactaca

SEQ ID NO: 2800 - DNA, 21 bp, Homo sapiens
ctgggatttggtatgatcaaa

SEQ ID NO: 2801 - DNA, 21 bp, Homo sapiens
agcgacatcatcattccctta

SEQ ID NO: 2802 - DNA, 21 bp, Homo sapiens
acggactacagagaacaacta

SEQ ID NO: 2803 - DNA, 21 bp, Homo sapiens
ctacattacctcaacatccaa

SEQ ID NO: 2804 - DNA, 21 bp, Homo sapiens
ctcacggtaattaatgtctta

SEQ ID NO: 2805 - DNA, 21 bp, Homo sapiens
cccactatacagtgaatgtta

SEQ ID NO: 2806 - DNA, 21 bp, Homo sapiens
ccgggaggaagttgatttcta

SEQ ID NO: 2807 - DNA, 21 bp, Homo sapiens
cacgtggtggtcttcaacgta

SEQ ID NO: 2808 - DNA, 21 bp, Homo sapiens
acgacaacaatccaaccttta

SEQ ID NO: 2809 - DNA, 21 bp, Homo sapiens
cccgtatttatgtaaaggtat

SEQ ID NO: 2810 - DNA, 21 bp, Homo sapiens
caggacctgcctggccattaa

SEQ ID NO: 2811 - DNA, 21 bp, Homo sapiens
ttggaagatgatggcaatgaa

SEQ ID NO: 2812 - DNA, 21 bp, Homo sapiens
cccaggtaaattgaccattaa

SEQ ID NO: 2813 - DNA, 21 bp, Homo sapiens
tacgaatattaaacacttcaa

SEQ ID NO: 2814 - DNA, 21 bp, Homo sapiens
cccgtcgctatcaaggaatta

SEQ ID NO: 2815 - DNA, 21 bp, Homo sapiens
cccatccaatttatcaaggaa

SEQ ID NO: 2816 - DNA, 21 bp, Homo sapiens
caggaactggatattctgaaa

SEQ ID NO: 2817 - DNA, 21 bp, Homo sapiens
cacgtagaatgtatatttgta

SEQ ID NO: 2818 - DNA, 21 bp, Homo sapiens
aagtctgtttgtcatatttaa

SEQ ID NO: 2819 - DNA, 21 bp, Homo sapiens
cagccttcggacagacatata

SEQ ID NO: 2820 - DNA, 21 bp, Homo sapiens
ttgcagatgattcaaaccgaa

SEQ ID NO: 2821 - DNA, 21 bp, Homo sapiens
tcggacagacatataggatat

SEQ ID NO: 2822 - DNA, 21 bp, Homo sapiens
cagcgccaagtaaacagggta

SEQ ID NO: 2823 - DNA, 21 bp, Homo sapiens
aaggatcatgtctgcgagcca

SEQ ID NO: 2824 - DNA, 21 bp, Homo sapiens
cccgatgggatggagcccgaa

SEQ ID NO: 2825 - DNA, 21 bp, Homo sapiens
caggaataagctggatctcca

SEQ ID NO: 2826 - DNA, 21 bp, Homo sapiens
caccttaattgaagactccaa

SEQ ID NO: 2827 - DNA, 21 bp, Homo sapiens
ctgaatggattgagacttcaa

SEQ ID NO: 2828 - DNA, 21 bp, Homo sapiens
caagaccaacttaatagtcaa

SEQ ID NO: 2829 - DNA, 21 bp, Homo sapiens
ctggtgcatcttcgtgtacaa

SEQ ID NO: 2830 - DNA, 21 bp, Homo sapiens
cccgactttagctatagttaa

SEQ ID NO: 2831 - DNA, 21 bp, Homo sapiens
atggtccgacatccaatacaa

SEQ ID NO: 2832 - DNA, 21 bp, Homo sapiens
aaaggtgattcgtgacttcaa

SEQ ID NO: 2833 - DNA, 21 bp, Homo sapiens
ttggagcagtgaacaacgtaa

SEQ ID NO: 2834 - DNA, 21 bp, Homo sapiens
ccagtgttgcctaagtattaa

SEQ ID NO: 2835 - DNA, 21 bp, Homo sapiens
cagaacttaaatagaaggcaa

SEQ ID NO: 2836 - DNA, 21 bp, Homo sapiens
cagagtgaatttgtatttaaa

SEQ ID NO: 2837 - DNA, 21 bp, Homo sapiens
aagcatcagttcacagcagta

SEQ ID NO: 2838 - DNA, 21 bp, Homo sapiens
aacaactgaacccatcaataa

SEQ ID NO: 2839 - DNA, 21 bp, Homo sapiens
caccagatagccatgaaccaa

SEQ ID NO: 2840 - DNA, 21 bp, Homo sapiens
tacgatatcaagttacactaa

SEQ ID NO: 2841 - DNA, 21 bp, Homo sapiens
caggccgtgcttaacaggaaa

SEQ ID NO: 2842 - DNA, 21 bp, Homo sapiens
cagattgaaatttattgttta

SEQ ID NO: 2843 - DNA, 21 bp, Homo sapiens
tagtatgttattcctggttaa

SEQ ID NO: 2844 - DNA, 21 bp, Homo sapiens
ctctatgtttattctagttaa

SEQ ID NO: 2845 - DNA, 21 bp, Homo sapiens
cccgctctttcggatcgctaa

SEQ ID NO: 2846 - DNA, 21 bp, Homo sapiens
tacgttgtacataatagtgta

SEQ ID NO: 2847 - DNA, 21 bp, Homo sapiens
caccaagtacctatatatgta

SEQ ID NO: 2848 - DNA, 21 bp, Homo sapiens
cccacggtaaacaatatggaa

SEQ ID NO: 2849 - DNA, 21 bp, Homo sapiens
ccgcacctacgtgatgcccaa

SEQ ID NO: 2850 - DNA, 21 bp, Homo sapiens
ctggaacaacctggagaaata

SEQ ID NO: 2851 - DNA, 21 bp, Homo sapiens
ctgatgggaaatcctacgtaa

SEQ ID NO: 2852 - DNA, 21 bp, Homo sapiens
cccgggcgagctggccaagta

SEQ ID NO: 2853 - DNA, 21 bp, Homo sapiens
aagggagaacttgaaacagat

SEQ ID NO: 2854 - DNA, 21 bp, Homo sapiens
cgccatgaccctggtactaaa

SEQ ID NO: 2855 - DNA, 21 bp, Homo sapiens
accaataaatcagaccatgaa

SEQ ID NO: 2856 - DNA, 21 bp, Homo sapiens
cagcaatgaggcggtggtcaa

SEQ ID NO: 2857 - DNA, 21 bp, Homo sapiens
ccagacctgcttcctgaaata

SEQ ID NO: 2858 - DNA, 21 bp, Homo sapiens
taagagctttatcaagaacta

SEQ ID NO: 2859 - DNA, 21 bp, Homo sapiens
ttgggagaaatatcaatgaaa

SEQ ID NO: 2860 - DNA, 21 bp, Homo sapiens
tcagtattcgaaataaacaaa

SEQ ID NO: 2861 - DNA, 21 bp, Homo sapiens
ctagttgagaactcaacatta

SEQ ID NO: 2862 - DNA, 21 bp, Homo sapiens
tagttgagaactcaacattaa

SEQ ID NO: 2863 - DNA, 21 bp, Homo sapiens
ccgcctggaattctaccgcta

SEQ ID NO: 2864 - DNA, 21 bp, Homo sapiens
cagcctcaggacagatacaaa

SEQ ID NO: 2865 - DNA, 21 bp, Homo sapiens
cagggaatgaatgtaacaaat

SEQ ID NO: 2866 - DNA, 21 bp, Homo sapiens
caccgataactcagacttgaa

SEQ ID NO: 2867 - DNA, 21 bp, Homo sapiens
ccgtttgtggtttaaagcaaa

SEQ ID NO: 2868 - DNA, 21 bp, Homo sapiens
ttggactaccctatcaagtaa

SEQ ID NO: 2869 - DNA, 21 bp, Homo sapiens
accgagcagctaagaaattat

SEQ ID NO: 2870 - DNA, 21 bp, Homo sapiens
cacggcctagtgaatgggata

SEQ ID NO: 2871 - DNA, 21 bp, Homo sapiens
gaggatttagacaagagtcaa

SEQ ID NO: 2872 - DNA, 21 bp, Homo sapiens
taggatatcagaattgttcaa

SEQ ID NO: 2873 - DNA, 21 bp, Homo sapiens
caggtcttagataaagaggaa

SEQ ID NO: 2874 - DNA, 21 bp, Homo sapiens
acgcagtaacttctacattaa

SEQ ID NO: 2875 - DNA, 21 bp, Homo sapiens
cagaagatctatccctatgaa

SEQ ID NO: 2876 - DNA, 21 bp, Homo sapiens
ccgcccagattccaacatcta

SEQ ID NO: 2877 - DNA, 21 bp, Homo sapiens
cccattcattacatagtataa

SEQ ID NO: 2878 - DNA, 21 bp, Homo sapiens
ttggtgatttatataaggtaa

SEQ ID NO: 2879 - DNA, 21 bp, Homo sapiens
agggtgtatattgagattaaa

SEQ ID NO: 2880 - DNA, 21 bp, Homo sapiens
ccagtactgaataaactcaaa

SEQ ID NO: 2881 - DNA, 21 bp, Homo sapiens
ccgccaggacatttcctataa

SEQ ID NO: 2882 - DNA, 21 bp, Homo sapiens
cccgcgaatgaagttacctta

SEQ ID NO: 2883 - DNA, 21 bp, Homo sapiens
accagctacacgattatcaaa

SEQ ID NO: 2884 - DNA, 21 bp, Homo sapiens
aacggaatggtgccattgtaa

SEQ ID NO: 2885 - DNA, 21 bp, Homo sapiens
cccggcagtatgtgtctgtaa

SEQ ID NO: 2886 - DNA, 21 bp, Homo sapiens
accagttggatctccaatgaa

SEQ ID NO: 2887 - DNA, 21 bp, Homo sapiens
cccaatggagtcatcacagaa

SEQ ID NO: 2888 - DNA, 21 bp, Homo sapiens
tacgagaaagatcaaagggaa

SEQ ID NO: 2889 - DNA, 21 bp, Homo sapiens
caggctgcgaaggaagtacta

SEQ ID NO: 2890 - DNA, 21 bp, Homo sapiens
accagtcatgatagtaataga

SEQ ID NO: 2891 - DNA, 21 bp, Homo sapiens
gagatgtaccttcaattgaaa

SEQ ID NO: 2892 - DNA, 21 bp, Homo sapiens
atgatactgactgattaatta

SEQ ID NO: 2893 - DNA, 21 bp, Homo sapiens
gcgggatgatgtgacctacaa

SEQ ID NO: 2894 - DNA, 21 bp, Homo sapiens
atggccctggattatctacta

SEQ ID NO: 2895 - DNA, 21 bp, Homo sapiens
cccggatcattcactgtgata

SEQ ID NO: 2896 - DNA, 21 bp, Homo sapiens
taggcctcactcaacaaccaa

SEQ ID NO: 2897 - DNA, 21 bp, Homo sapiens
ccgagaggacctcgtctacaa

SEQ ID NO: 2898 - DNA, 21 bp, Homo sapiens
cacgctttctagaggacgata

SEQ ID NO: 2899 - DNA, 21 bp, Homo sapiens
cgccaatctctagatcaacaa

SEQ ID NO: 2900 - DNA, 21 bp, Homo sapiens
ccgggagaccttcacccttta

SEQ ID NO: 2901 - DNA, 21 bp, Homo sapiens
ctggagctttgggatactcat

SEQ ID NO: 2902 - DNA, 21 bp, Homo sapiens
aaccgccaatctctagatcaa

SEQ ID NO: 2903 - DNA, 21 bp, Homo sapiens
ccactatggcttcaactccaa

SEQ ID NO: 2904 - DNA, 21 bp, Homo sapiens
ttccaggaattctacattcaa

SEQ ID NO: 2905 - DNA, 21 bp, Homo sapiens
caacagataccctcacttcaa

SEQ ID NO: 2906 - DNA, 21 bp, Homo sapiens
caacatggctttgatgataaa

SEQ ID NO: 2907 - DNA, 21 bp, Homo sapiens
aagcatgaagagctaatgcta

SEQ ID NO: 2908 - DNA, 21 bp, Homo sapiens
caggaggagactatacaacta

SEQ ID NO: 2909 - DNA, 21 bp, Homo sapiens
aaggaggtgggctctcatcaa

SEQ ID NO: 2910 - DNA, 21 bp, Homo sapiens
aaggcgattactcagtgttaa

SEQ ID NO: 2911 - DNA, 21 bp, Homo sapiens
cgccatatagatagaaattat

SEQ ID NO: 2912 - DNA, 21 bp, Homo sapiens
ttggatattgtgagacctcca

SEQ ID NO: 2913 - DNA, 21 bp, Homo sapiens
caggtggatgttagaagtcga

SEQ ID NO: 2914 - DNA, 21 bp, Homo sapiens
tcggttctaaaggatgatatt

SEQ ID NO: 2915 - DNA, 21 bp, Homo sapiens
aacactggtgctgatcggcaa

SEQ ID NO: 2916 - DNA, 21 bp, Homo sapiens
cttcgtcatgttgaactataa

SEQ ID NO: 2917 - DNA, 21 bp, Homo sapiens
ccagagcttcaagactgttta

SEQ ID NO: 2918 - DNA, 21 bp, Homo sapiens
accggcgatgctgagaaccaa

SEQ ID NO: 2919 - DNA, 21 bp, Homo sapiens
caccggaatactgtggtgtaa

SEQ ID NO: 2920 - DNA, 21 bp, Homo sapiens
tcgggatttggcagcccgtaa

SEQ ID NO: 2921 - DNA, 21 bp, Homo sapiens
ctggagaatttacgcattatt

SEQ ID NO: 2922 - DNA, 21 bp, Homo sapiens
ctacgtgttagtggctcttaa

SEQ ID NO: 2923 - DNA, 21 bp, Homo sapiens
caccgtgaagtcagtcaacaa

SEQ ID NO: 2924 - DNA, 21 bp, Homo sapiens
caccgtgaagtcagtcaacaa

SEQ ID NO: 2925 - DNA, 21 bp, Homo sapiens
cccgggtgactgaatgtctga

SEQ ID NO: 2926 - DNA, 21 bp, Homo sapiens
accgtgaagtcagtcaacaaa

SEQ ID NO: 2927 - DNA, 21 bp, Homo sapiens
ccgggaggatattgctgtgat

SEQ ID NO: 2928 - DNA, 21 bp, Homo sapiens
ccgattctatgaggaatttga

SEQ ID NO: 2929 - DNA, 21 bp, Homo sapiens
tcgaaagttgctcaacttcta

SEQ ID NO: 2930 - DNA, 21 bp, Homo sapiens
cccgctcaccctccttgctaa

SEQ ID NO: 2931 - DNA, 21 bp, Homo sapiens
ctgggtcagtaattacaagta

SEQ ID NO: 2932 - DNA, 21 bp, Homo sapiens
cagctttagcaaagaactctt

SEQ ID NO: 2933 - DNA, 21 bp, Homo sapiens
agcgtatatgacatcgaataa

SEQ ID NO: 2934 - DNA, 21 bp, Homo sapiens
cagtcctatttagacatgtaa

SEQ ID NO: 2935 - DNA, 21 bp, Homo sapiens
acccatgtgcatgagtacaaa

SEQ ID NO: 2936 - DNA, 21 bp, Homo sapiens
ccgggaatatgtggcaatcaa

SEQ ID NO: 2937 - DNA, 21 bp, Homo sapiens
ccggttcacctccgatgccaa

SEQ ID NO: 2938 - DNA, 21 bp, Homo sapiens
accgttctgaataaacagaat

SEQ ID NO: 2939 - DNA, 21 bp, Homo sapiens
cagctgcggctccttcatcaa

SEQ ID NO: 2940 - DNA, 21 bp, Homo sapiens
acgcaggtacaagaagctcaa

SEQ ID NO: 2941 - DNA, 21 bp, Homo sapiens
ccgcttcatgaaatgcctcaa

SEQ ID NO: 2942 - DNA, 21 bp, Homo sapiens
cagcacttctatagcgtcaaa

SEQ ID NO: 2943 - DNA, 21 bp, Homo sapiens
ctcggattacttcattagcta

SEQ ID NO: 2944 - DNA, 21 bp, Homo sapiens
ccgacgagtgatggcactgaa

SEQ ID NO: 2945 - DNA, 21 bp, Homo sapiens
tcggattacttcattagctat

SEQ ID NO: 2946 - DNA, 21 bp, Homo sapiens
atgcatgtcgttccaaactaa

SEQ ID NO: 2947 - DNA, 21 bp, Homo sapiens
cccggtcaagttggtttcaaa

SEQ ID NO: 2948 - DNA, 21 bp, Homo sapiens
ctgtgatgagtcaagccttaa

SEQ ID NO: 2949 - DNA, 21 bp, Homo sapiens
ctcattgtatgtgaggttgaa

SEQ ID NO: 2950 - DNA, 21 bp, Homo sapiens
agggatttatgtagcagctat

SEQ ID NO: 2951 - DNA, 21 bp, Homo sapiens
atgggctatggctatgagaaa

SEQ ID NO: 2952 - DNA, 21 bp, Homo sapiens
cagcagagctttaagcaagaa

SEQ ID NO: 2953 - DNA, 21 bp, Homo sapiens
accggagtcattgggaaggaa

SEQ ID NO: 2954 - DNA, 21 bp, Homo sapiens
ccggagtcattgggaaggaaa

SEQ ID NO: 2955 - DNA, 21 bp, Homo sapiens
cagaaattactcaatgctgaa

SEQ ID NO: 2956 - DNA, 21 bp, Homo sapiens
caggatctcagtcaacttcaa

SEQ ID NO: 2957 - DNA, 21 bp, Homo sapiens
cagctaatcgataatatggaa

SEQ ID NO: 2958 - DNA, 21 bp, Homo sapiens
aagaagcaacttgtagtttaa

SEQ ID NO: 2959 - DNA, 21 bp, Homo sapiens
ctgaactagcagatcaccaaa

SEQ ID NO: 2960 - DNA, 21 bp, Homo sapiens
ccagtgctatccagtccataa

SEQ ID NO: 2961 - DNA, 21 bp, Homo sapiens
gagctgtgaatgattctataa

SEQ ID NO: 2962 - DNA, 21 bp, Homo sapiens
cagcactacgtcttccttaaa

SEQ ID NO: 2963 - DNA, 21 bp, Homo sapiens
aaccctataactcctgaagta

SEQ ID NO: 2964 - DNA, 21 bp, Homo sapiens
catggtagaccttgcaattta

SEQ ID NO: 2965 - DNA, 21 bp, Homo sapiens
atggctatgctaatttgctta

SEQ ID NO: 2966 - DNA, 21 bp, Homo sapiens
gagctaaactgtgtaatttaa

SEQ ID NO: 2967 - DNA, 21 bp, Homo sapiens
caggatttatcttagatacta

SEQ ID NO: 2968 - DNA, 21 bp, Homo sapiens
caggtattggctaattctcaa

SEQ ID NO: 2969 - DNA, 21 bp, Homo sapiens
cagagtagctatggtcaacaa

SEQ ID NO: 2970 - DNA, 21 bp, Homo sapiens
ctgcattgactaccagattta

SEQ ID NO: 2971 - DNA, 21 bp, Homo sapiens
tccgggttgtggaaaccagaa

SEQ ID NO: 2972 - DNA, 21 bp, Homo sapiens
caagagggcctcttaactgta

SEQ ID NO: 2973 - DNA, 21 bp, Homo sapiens
cccgactgcatcaaccagata

SEQ ID NO: 2974 - DNA, 21 bp, Homo sapiens
tagatggatggcagacattaa

SEQ ID NO: 2975 - DNA, 21 bp, Homo sapiens
cccaatggcaccgaagttaaa

SEQ ID NO: 2976 - DNA, 21 bp, Homo sapiens
caggaaataattcactcacaa

SEQ ID NO: 2977 - DNA, 21 bp, Homo sapiens
tcggtataaatatgtagataa

SEQ ID NO: 2978 - DNA, 21 bp, Homo sapiens
aactcggtaactctcatataa

SEQ ID NO: 2979 - DNA, 21 bp, Homo sapiens
tcagttaggatacatcactaa

SEQ ID NO: 2980 - DNA, 21 bp, Homo sapiens
aaggctaacttgctaatcaca

SEQ ID NO: 2981 - DNA, 21 bp, Homo sapiens
cagttaggatacatcactaaa

SEQ ID NO: 2982 - DNA, 21 bp, Homo sapiens
caggagccacgattactgtaa

SEQ ID NO: 2983 - DNA, 21 bp, Homo sapiens
ttggataatttctcaaaccaa

SEQ ID NO: 2984 - DNA, 21 bp, Homo sapiens
cccattcaagaccctgatcaa

SEQ ID NO: 2985 - DNA, 21 bp, Homo sapiens
taggaattaggtcattccgaa

SEQ ID NO: 2986 - DNA, 21 bp, Homo sapiens
cgccattaatgggatgatcta

SEQ ID NO: 2987 - DNA, 21 bp, Homo sapiens
cagttgaatatccatgtggaa

SEQ ID NO: 2988 - DNA, 21 bp, Homo sapiens
tcgaactgtcctggcaccaaa

SEQ ID NO: 2989 - DNA, 21 bp, Homo sapiens
cagggtctcccagtacatcga

SEQ ID NO: 2990 - DNA, 21 bp, Homo sapiens
ctggttcttatccattatcat

SEQ ID NO: 2991 - DNA, 21 bp, Homo sapiens
cacgagcgttcacctgttcaa

SEQ ID NO: 2992 - DNA, 21 bp, Homo sapiens
agcgttgacattctattggaa

SEQ ID NO: 2993 - DNA, 21 bp, Homo sapiens
caaggagagatgggacactaa

SEQ ID NO: 2994 - DNA, 21 bp, Homo sapiens
tacaatgtaatagaagcttaa

SEQ ID NO: 2995 - DNA, 21 bp, Homo sapiens
cggcttctcggaagtaattta

SEQ ID NO: 2996 - DNA, 21 bp, Homo sapiens
ttggaggagattgatggtcta

SEQ ID NO: 2997 - DNA, 21 bp, Homo sapiens
cagagtttgcttcactctcta

SEQ ID NO: 2998 - DNA, 21 bp, Homo sapiens
acgggagagagtcagaatcaa

SEQ ID NO: 2999 - DNA, 21 bp, Homo sapiens
tcgaatctggatgatgctaaa

SEQ ID NO: 3000 - DNA, 21 bp, Homo sapiens
tagcctgaggataaaggctga

SEQ ID NO: 3001 - DNA, 21 bp, Homo sapiens
ctgacttgaataatttatcaa

SEQ ID NO: 3002 - DNA, 21 bp, Homo sapiens
aacgccgaggagagcttgtaa

SEQ ID NO: 3003 - DNA, 21 bp, Homo sapiens
atgcatcatagcaatttgata

SEQ ID NO: 3004 - DNA, 21 bp, Homo sapiens
ttggagcgatttgaaattcca

SEQ ID NO: 3005 - DNA, 21 bp, Homo sapiens
cagattatagatcgtaagaaa

SEQ ID NO: 3006 - DNA, 21 bp, Homo sapiens
aagggcagagttacttgataa

SEQ ID NO: 3007 - DNA, 21 bp, Homo sapiens
ccggctcgttcgacaggccaa

SEQ ID NO: 3008 - DNA, 21 bp, Homo sapiens
ccgcgggaactaactcttcaa

SEQ ID NO: 3009 - DNA, 21 bp, Homo sapiens
ctcattgaggtagaattacta

SEQ ID NO: 3010 - DNA, 21 bp, Homo sapiens
cccaggtaatcgagacactta

SEQ ID NO: 3011 - DNA, 21 bp, Homo sapiens
caggtcatgtgaagacatcaa

SEQ ID NO: 3012 - DNA, 21 bp, Homo sapiens
caggatgtgtgtcgatgtcaa

SEQ ID NO: 3013 - DNA, 21 bp, Homo sapiens
ggccgcatgcttggaggtaaa

SEQ ID NO: 3014 - DNA, 21 bp, Homo sapiens
ccgccgttcagtcgccaatat

SEQ ID NO: 3015 - DNA, 21 bp, Homo sapiens
acaggagaagaagaagaagaa

SEQ ID NO: 3016 - DNA, 21 bp, Homo sapiens
aagccacttagttcagtcaaa

SEQ ID NO: 3017 - DNA, 21 bp, Homo sapiens
tggaactaagttattcggcaa

SEQ ID NO: 3018 - DNA, 21 bp, Homo sapiens
gagcttattgtcgtaagaata

SEQ ID NO: 3019 - DNA, 21 bp, Homo sapiens
tccatggaatagaatatttaa

SEQ ID NO: 3020 - DNA, 21 bp, Homo sapiens
cacatttctcttgaagattaa

SEQ ID NO: 3021 - DNA, 21 bp, Homo sapiens
cccaatgtccagcctctttaa

SEQ ID NO: 3022 - DNA, 21 bp, Homo sapiens
aacctctaacaacaaattaaa

SEQ ID NO: 3023 - DNA, 21 bp, Homo sapiens
ttcgctgagttaagttatgaa

SEQ ID NO: 3024 - DNA, 21 bp, Homo sapiens
cagactgagaagtcagatgaa

SEQ ID NO: 3025 - DNA, 21 bp, Homo sapiens
cagctttgcaaatggcatcaa

SEQ ID NO: 3026 - DNA, 21 bp, Homo sapiens
aaggatacaattatagctaca

SEQ ID NO: 3027 - DNA, 21 bp, Homo sapiens
ccgggactgggccacgtacaa

SEQ ID NO: 3028 - DNA, 21 bp, Homo sapiens
ctgccatgtgtcaaacctgaa

SEQ ID NO: 3029 - DNA, 21 bp, Homo sapiens
caggttgggaacatgctggaa

SEQ ID NO: 3030 - DNA, 21 bp, Homo sapiens
tgggaacatgctggaaataaa

SEQ ID NO: 3031 - DNA, 21 bp, Homo sapiens
cacgtggacatctacgagaaa

SEQ ID NO: 3032 - DNA, 21 bp, Homo sapiens
aagcgtgccctttgactccaa

SEQ ID NO: 3033 - DNA, 21 bp, Homo sapiens
ctggaatattaatgctaaaca

SEQ ID NO: 3034 - DNA, 21 bp, Homo sapiens
ccgactggtgtggcaatccaa

SEQ ID NO: 3035 - DNA, 21 bp, Homo sapiens
acccatatcctcaggaggtaa

SEQ ID NO: 3036 - DNA, 21 bp, Homo sapiens
cccaagggtaataaacgtgta

SEQ ID NO: 3037 - DNA, 21 bp, Homo sapiens
cacaatgatgagtgcaaacat

SEQ ID NO: 3038 - DNA, 21 bp, Homo sapiens
taagtccattgttacatgaaa

SEQ ID NO: 3039 - DNA, 21 bp, Homo sapiens
ctgactgccagtgaagccaaa

SEQ ID NO: 3040 - DNA, 21 bp, Homo sapiens
caagagctactttggccgtaa

SEQ ID NO: 3041 - DNA, 21 bp, Homo sapiens
atggccatttatacatgcaaa

SEQ ID NO: 3042 - DNA, 21 bp, Homo sapiens
taccaaatgatagctcataaa

SEQ ID NO: 3043 - DNA, 21 bp, Homo sapiens
cagattgtattcaaagcatca

SEQ ID NO: 3044 - DNA, 21 bp, Homo sapiens
taggtagagctgagaatacta

SEQ ID NO: 3045 - DNA, 21 bp, Homo sapiens
agggttgattgatgaagtcaa

SEQ ID NO: 3046 - DNA, 21 bp, Homo sapiens
agggctttagctcgtgaagta

SEQ ID NO: 3047 - DNA, 21 bp, Homo sapiens
cagccaataaccgtgataata

SEQ ID NO: 3048 - DNA, 21 bp, Homo sapiens
acgcgtcgttcatgctctaaa

SEQ ID NO: 3049 - DNA, 21 bp, Homo sapiens
accgtatagagtatactgtga

SEQ ID NO: 3050 - DNA, 21 bp, Homo sapiens
caggaaatgggatccatataa

SEQ ID NO: 3051 - DNA, 21 bp, Homo sapiens
tagagtatactgtgacatgaa

SEQ ID NO: 3052 - DNA, 21 bp, Homo sapiens
cagcacgtatgacagagacaa

SEQ ID NO: 3053 - DNA, 21 bp, Homo sapiens
gcccatttcgaagatatacaa

SEQ ID NO: 3054 - DNA, 21 bp, Homo sapiens
gagaatgatagtaataggata

SEQ ID NO: 3055 - DNA, 21 bp, Homo sapiens
aaagtaggaactcttaagcaa

SEQ ID NO: 3056 - DNA, 21 bp, Homo sapiens
ctgatacttatttacctataa

SEQ ID NO: 3057 - DNA, 21 bp, Homo sapiens
tgccttgtggatatcaagaaa

SEQ ID NO: 3058 - DNA, 21 bp, Homo sapiens
atgctaaactttactgatgta

SEQ ID NO: 3059 - DNA, 21 bp, Homo sapiens
tagcactagtcttaaattgta

SEQ ID NO: 3060 - DNA, 21 bp, Homo sapiens
aacaatattagtcgtatccaa

SEQ ID NO: 3061 - DNA, 21 bp, Homo sapiens
cgggcggtacctggccatgaa

SEQ ID NO: 3062 - DNA, 21 bp, Homo sapiens
ttgtgtcatcacaacattaaa

SEQ ID NO: 3063 - DNA, 21 bp, Homo sapiens
cagggtccagtgggaactgaa

SEQ ID NO: 3064 - DNA, 21 bp, Homo sapiens
ttgctcctgggtggaaattaa

SEQ ID NO: 3065 - DNA, 21 bp, Homo sapiens
cacaagagtctagatcagtta

SEQ ID NO: 3066 - DNA, 21 bp, Homo sapiens
tagtttgtagctacagtagaa

SEQ ID NO: 3067 - DNA, 21 bp, Homo sapiens
agcctttacatttgtacacaa

SEQ ID NO: 3068 - DNA, 21 bp, Homo sapiens
cacccggagcactacactata

SEQ ID NO: 3069 - DNA, 21 bp, Homo sapiens
gcgcttcgagttcctcaacta

SEQ ID NO: 3070 - DNA, 21 bp, Homo sapiens
caagagcaacggcaaaggcaa

SEQ ID NO: 3071 - DNA, 21 bp, Homo sapiens
cacggagattgtgctggagaa

SEQ ID NO: 3072 - DNA, 21 bp, Homo sapiens
ctacatctgcatgaacaagaa

SEQ ID NO: 3073 - DNA, 21 bp, Homo sapiens
ttggatatacctcgcctaata

SEQ ID NO: 3074 - DNA, 21 bp, Homo sapiens
gcgatactatgttgcattaaa

SEQ ID NO: 3075 - DNA, 21 bp, Homo sapiens
tacgtactcgtcaaacctata

SEQ ID NO: 3076 - DNA, 21 bp, Homo sapiens
atcgcagtgaacttaaagcaa

SEQ ID NO: 3077 - DNA, 21 bp, Homo sapiens
caggaagtaagctaatgctta

SEQ ID NO: 3078 - DNA, 21 bp, Homo sapiens
agggttgtatatagccatgaa

SEQ ID NO: 3079 - DNA, 21 bp, Homo sapiens
aagaatttagtgtatctgtaa

SEQ ID NO: 3080 - DNA, 21 bp, Homo sapiens
cagctttgtgctaatgaatta

SEQ ID NO: 3081 - DNA, 21 bp, Homo sapiens
caggaggttctgggcctctga

SEQ ID NO: 3082 - DNA, 21 bp, Homo sapiens
ccgcctgaccttcggacccta

SEQ ID NO: 3083 - DNA, 21 bp, Homo sapiens
caggctcttccggcaagtcaa

SEQ ID NO: 3084 - DNA, 21 bp, Homo sapiens
cacattgactactataagaaa

SEQ ID NO: 3085 - DNA, 21 bp, Homo sapiens
cagcactaaggtggcggtgaa

SEQ ID NO: 3086 - DNA, 21 bp, Homo sapiens
ttgattctgtaaataagtaaa

SEQ ID NO: 3087 - DNA, 21 bp, Homo sapiens
cagaccttgtctagttattta

SEQ ID NO: 3088 - DNA, 21 bp, Homo sapiens
cacgtggaacggcagcactaa

SEQ ID NO: 3089 - DNA, 21 bp, Homo sapiens
gagatctacgatgaactttaa

SEQ ID NO: 3090 - DNA, 21 bp, Homo sapiens
caggaatttagtggttatgtt

SEQ ID NO: 3091 - DNA, 21 bp, Homo sapiens
cccaacgatcatgttaataaa

SEQ ID NO: 3092 - DNA, 21 bp, Homo sapiens
taggatgtgctaggtctaaga

SEQ ID NO: 3093 - DNA, 21 bp, Homo sapiens
tccactgagaacagtctgtaa

SEQ ID NO: 3094 - DNA, 21 bp, Homo sapiens
ttcgctcttgtgaataggaaa

SEQ ID NO: 3095 - DNA, 21 bp, Homo sapiens
accctttagtgctttgtgata

SEQ ID NO: 3096 - DNA, 21 bp, Homo sapiens
ctcccgttgcgtcaagtctaa

SEQ ID NO: 3097 - DNA, 21 bp, Homo sapiens
aaggtaatgaccagttgttat

SEQ ID NO: 3098 - DNA, 21 bp, Homo sapiens
atcgagtaaggcacacccaaa

SEQ ID NO: 3099 - DNA, 21 bp, Homo sapiens
cactgccttaccttcacttaa

SEQ ID NO: 3100 - DNA, 21 bp, Homo sapiens
cagagggacttgagccagtta

SEQ ID NO: 3101 - DNA, 21 bp, Homo sapiens
cacaaggtgctcagacatgaa

SEQ ID NO: 3102 - DNA, 21 bp, Homo sapiens
aacaatgtcctctttgagaaa

SEQ ID NO: 3103 - DNA, 21 bp, Homo sapiens
cacgcttgtatttgaggtgga

SEQ ID NO: 3104 - DNA, 21 bp, Homo sapiens
agggatgaggtctgataagaa

SEQ ID NO: 3105 - DNA, 21 bp, Homo sapiens
ttgagtgaattagacctttat

SEQ ID NO: 3106 - DNA, 21 bp, Homo sapiens
agcaataaagtggaaacaata

SEQ ID NO: 3107 - DNA, 21 bp, Homo sapiens
gcgacaggttctctacttaaa

SEQ ID NO: 3108 - DNA, 21 bp, Homo sapiens
tcggctggcagtctccctaaa

SEQ ID NO: 3109 - DNA, 21 bp, Homo sapiens
aacgccgatgattggagacaa

SEQ ID NO: 3110 - DNA, 21 bp, Homo sapiens
acgggtaaacagattgagcat

SEQ ID NO: 3111 - DNA, 21 bp, Homo sapiens
ccgccacaacctctcgctcaa

SEQ ID NO: 3112 - DNA, 21 bp, Homo sapiens
aacgggaatagtagctgtcaa

SEQ ID NO: 3113 - DNA, 21 bp, Homo sapiens
ctccagtgaacgggaatagta

SEQ ID NO: 3114 - DNA, 21 bp, Homo sapiens
acgggaatagtagctgtcaaa

SEQ ID NO: 3115 - DNA, 21 bp, Homo sapiens
aagaccatcatccctggacta

SEQ ID NO: 3116 - DNA, 21 bp, Homo sapiens
tccaccacacatggtcttgaa

SEQ ID NO: 3117 - DNA, 21 bp, Homo sapiens
caccagggctcctgactgaaa

SEQ ID NO: 3118 - DNA, 21 bp, Homo sapiens
taggacttattgggttattat

SEQ ID NO: 3119 - DNA, 21 bp, Homo sapiens
ccaaattatcctctaattata

SEQ ID NO: 3120 - DNA, 21 bp, Homo sapiens
ccgccggaacatgaccatcaa

SEQ ID NO: 3121 - DNA, 21 bp, Homo sapiens
ccgagtgagccttaacatcca

SEQ ID NO: 3122 - DNA, 21 bp, Homo sapiens
cactgggtgtgcattgattta

SEQ ID NO: 3123 - DNA, 21 bp, Homo sapiens
ccggcgggtcgtgccctggaa

SEQ ID NO: 3124 - DNA, 21 bp, Homo sapiens
cccattggtgtcaattgaata

SEQ ID NO: 3125 - DNA, 21 bp, Homo sapiens
acctttgtatttgttctttaa

SEQ ID NO: 3126 - DNA, 21 bp, Homo sapiens
caggacatatgtggccttgaa

SEQ ID NO: 3127 - DNA, 21 bp, Homo sapiens
cacaggcaacatggtgaagaa

SEQ ID NO: 3128 - DNA, 21 bp, Homo sapiens
ccgcttcaccatcgacaccaa

SEQ ID NO: 3129 - DNA, 21 bp, Homo sapiens
cccgaatctatctttgacaaa

SEQ ID NO: 3130 - DNA, 21 bp, Homo sapiens
tcgccggaagttgtatggtta

SEQ ID NO: 3131 - DNA, 21 bp, Homo sapiens
cactacagtattagcaagcaa

SEQ ID NO: 3132 - DNA, 21 bp, Homo sapiens
accgcatatggtatccctcaa

SEQ ID NO: 3133 - DNA, 21 bp, Homo sapiens
accaattcaagtgaagattat

SEQ ID NO: 3134 - DNA, 21 bp, Homo sapiens
caggtttaaagcctacccaca

SEQ ID NO: 3135 - DNA, 21 bp, Homo sapiens
tacgttgatttcagagaatat

SEQ ID NO: 3136 - DNA, 21 bp, Homo sapiens
ccggcttgagtgaattgtgta

SEQ ID NO: 3137 - DNA, 21 bp, Homo sapiens
tagtatagttgaaataagaaa

SEQ ID NO: 3138 - DNA, 21 bp, Homo sapiens
gcgggatttgttgaagagaaa

SEQ ID NO: 3139 - DNA, 21 bp, Homo sapiens
gcgcgtgaacacggagataca

SEQ ID NO: 3140 - DNA, 21 bp, Homo sapiens
ctcctccgacttcgctgtcaa

SEQ ID NO: 3141 - DNA, 21 bp, Homo sapiens
ccgccgattattccttggtaa

SEQ ID NO: 3142 - DNA, 21 bp, Homo sapiens
cgcgctgatgtcggagctcaa

SEQ ID NO: 3143 - DNA, 21 bp, Homo sapiens
cacgctcttggtcaacaggaa

SEQ ID NO: 3144 - DNA, 21 bp, Homo sapiens
caccgtgtgggctgagtttaa

SEQ ID NO: 3145 - DNA, 21 bp, Homo sapiens
cagtactttcatagccggcaa

SEQ ID NO: 3146 - DNA, 21 bp, Homo sapiens
aggcctcactgtacaagtata

SEQ ID NO: 3147 - DNA, 21 bp, Homo sapiens
atcatgcaaattacggcttaa

SEQ ID NO: 3148 - DNA, 21 bp, Homo sapiens
ccgaacattcaaggtcatcaa

SEQ ID NO: 3149 - DNA, 21 bp, Homo sapiens
ccggacatcatgtgtatccca

SEQ ID NO: 3150 - DNA, 21 bp, Homo sapiens
aagaatcatgtcatgatctta

SEQ ID NO: 3151 - DNA, 21 bp, Homo sapiens
cccgctgggcagcacaagtaa

SEQ ID NO: 3152 - DNA, 21 bp, Homo sapiens
aactatgttctttatatctaa

SEQ ID NO: 3153 - DNA, 21 bp, Homo sapiens
acgaagattatcctaatttca

SEQ ID NO: 3154 - DNA, 21 bp, Homo sapiens
atcggccttatcggccttaaa

SEQ ID NO: 3155 - DNA, 21 bp, Homo sapiens
aaagaagatatttctatacaa

SEQ ID NO: 3156 - DNA, 21 bp, Homo sapiens
cacgatgggtcacaagagtat

SEQ ID NO: 3157 - DNA, 21 bp, Homo sapiens
aaggcggacaggcgacactaa

SEQ ID NO: 3158 - DNA, 21 bp, Homo sapiens
aaccaaaggtttgaccatgaa

SEQ ID NO: 3159 - DNA, 21 bp, Homo sapiens
ctgagtcagcatccaacctta

SEQ ID NO: 3160 - DNA, 21 bp, Homo sapiens
ctgggccactcaggtatttaa

SEQ ID NO: 3161 - DNA, 21 bp, Homo sapiens
cacgtgatagtcataacccta

SEQ ID NO: 3162 - DNA, 21 bp, Homo sapiens
ctgggtaagactactcagtaa

SEQ ID NO: 3163 - DNA, 21 bp, Homo sapiens
taggaactaattaaacatgga

SEQ ID NO: 3164 - DNA, 21 bp, Homo sapiens
cggccttattctcataattaa

SEQ ID NO: 3165 - DNA, 21 bp, Homo sapiens
ctggacttcagggtttaacaa

SEQ ID NO: 3166 - DNA, 21 bp, Homo sapiens
cacatgtgtcttgagaattat

SEQ ID NO: 3167 - DNA, 21 bp, Homo sapiens
cccactgttctgtgcaatgaa

SEQ ID NO: 3168 - DNA, 21 bp, Homo sapiens
taaggatgtttcctacctata

SEQ ID NO: 3169 - DNA, 21 bp, Homo sapiens
tagagggttcctgtagaccta

SEQ ID NO: 3170 - DNA, 21 bp, Homo sapiens
tgggttcattattggaattaa

SEQ ID NO: 3171 - DNA, 21 bp, Homo sapiens
atggattctcagatatttata

SEQ ID NO: 3172 - DNA, 21 bp, Homo sapiens
gaccaatattatactaagaaa

SEQ ID NO: 3173 - DNA, 21 bp, Homo sapiens
ctggagtgaattaaagccttt

SEQ ID NO: 3174 - DNA, 21 bp, Homo sapiens
ccgcactgtcccagtagccaa

SEQ ID NO: 3175 - DNA, 21 bp, Homo sapiens
acgaccctaaagagaggataa

SEQ ID NO: 3176 - DNA, 21 bp, Homo sapiens
ttgcaaggcatgtacaaagaa

SEQ ID NO: 3177 - DNA, 21 bp, Homo sapiens
caccgtgagcctggccaagaa

SEQ ID NO: 3178 - DNA, 21 bp, Homo sapiens
aaccagtgacacagctaccaa

SEQ ID NO: 3179 - DNA, 21 bp, Homo sapiens
ccggagtgttagaatatgcca

SEQ ID NO: 3180 - DNA, 21 bp, Homo sapiens
ccggcacaatgcagccaacaa

SEQ ID NO: 3181 - DNA, 21 bp, Homo sapiens
accaattatacccgttcttta

SEQ ID NO: 3182 - DNA, 21 bp, Homo sapiens
caggcctatggtcgagattta

SEQ ID NO: 3183 - DNA, 21 bp, Homo sapiens
caacatcaccattgcaataga

SEQ ID NO: 3184 - DNA, 21 bp, Homo sapiens
tcgtttctgcataagcatcaa

SEQ ID NO: 3185 - DNA, 21 bp, Homo sapiens
aagaatgtcgtttctgcataa

SEQ ID NO: 3186 - DNA, 21 bp, Homo sapiens
caccagggatctggtgtataa

SEQ ID NO: 3187 - DNA, 21 bp, Homo sapiens
cgggctgcggatggacagtaa

SEQ ID NO: 3188 - DNA, 21 bp, Homo sapiens
tgctataatggtgaaagttaa

SEQ ID NO: 3189 - DNA, 21 bp, Homo sapiens
ctgttggttagtagacactaa

SEQ ID NO: 3190 - DNA, 21 bp, Homo sapiens
aaccatatactgtgaatttaa

SEQ ID NO: 3191 - DNA, 21 bp, Homo sapiens
acgcaggtgcatggtcttcaa

SEQ ID NO: 3192 - DNA, 21 bp, Homo sapiens
aaggataaccgagtttgctaa

SEQ ID NO: 3193 - DNA, 21 bp, Homo sapiens
cagggagaagttgagcaggta

SEQ ID NO: 3194 - DNA, 21 bp, Homo sapiens
ctggaataaatttcgcaatta

SEQ ID NO: 3195 - DNA, 21 bp, Homo sapiens
ccggaagaggaacatccgcta

SEQ ID NO: 3196 - DNA, 21 bp, Homo sapiens
tacgaccttgttaacagctat

SEQ ID NO: 3197 - DNA, 21 bp, Homo sapiens
tccactctatctacttgataa

SEQ ID NO: 3198 - DNA, 21 bp, Homo sapiens
ttcgctatgtttacagtgata

SEQ ID NO: 3199 - DNA, 21 bp, Homo sapiens
acaggataattcagacaacaa

SEQ ID NO: 3200 - DNA, 21 bp, Homo sapiens
caagcagattggtattattaa

SEQ ID NO: 3201 - DNA, 21 bp, Homo sapiens
ctgggtgagaatgttacaatt

SEQ ID NO: 3202 - DNA, 21 bp, Homo sapiens
acagcccatgattaatttgta

SEQ ID NO: 3203 - DNA, 21 bp, Homo sapiens
cagcggctagcgaagattcaa

SEQ ID NO: 3204 - DNA, 21 bp, Homo sapiens
cacgggcggagacaccatcta

SEQ ID NO: 3205 - DNA, 21 bp, Homo sapiens
cagtgctagcctcaacatcaa

SEQ ID NO: 3206 - DNA, 21 bp, Homo sapiens
caccatctacctggccaatta

SEQ ID NO: 3207 - DNA, 21 bp, Homo sapiens
caggcaaagaaagaaattgaa

SEQ ID NO: 3208 - DNA, 21 bp, Homo sapiens
tagactcaaatgcttagggaa

SEQ ID NO: 3209 - DNA, 21 bp, Homo sapiens
caggaatgtggctgcaagcaa

SEQ ID NO: 3210 - DNA, 21 bp, Homo sapiens
aagaatttacagttccttcaa

SEQ ID NO: 3211 - DNA, 21 bp, Homo sapiens
ctggacacccttggaagcaaa

SEQ ID NO: 3212 - DNA, 21 bp, Homo sapiens
cacctgtcaacctgaattaaa

SEQ ID NO: 3213 - DNA, 21 bp, Homo sapiens
cagctggacttcgaagatgta

SEQ ID NO: 3214 - DNA, 21 bp, Homo sapiens
accagtgtcctgggtatccta

SEQ ID NO: 3215 - DNA, 21 bp, Homo sapiens
cacggtgagaccaccgtgtga

SEQ ID NO: 3216 - DNA, 21 bp, Homo sapiens
caccatggtgtcggtggccta

SEQ ID NO: 3217 - DNA, 21 bp, Homo sapiens
cacgtacttggtagacatgca

SEQ ID NO: 3218 - DNA, 21 bp, Homo sapiens
cacggtctacatgatcaaata

SEQ ID NO: 3219 - DNA, 21 bp, Homo sapiens
cagcagcgtcgtcataggtaa

SEQ ID NO: 3220 - DNA, 21 bp, Homo sapiens
cagaataaacttcacccagaa

SEQ ID NO: 3221 - DNA, 21 bp, Homo sapiens
tagcagagcaatcaccaccaa

SEQ ID NO: 3222 - DNA, 21 bp, Homo sapiens
ctggcttattcccatgtgtga

SEQ ID NO: 3223 - DNA, 21 bp, Homo sapiens
tgggatccagtcaacacatta

SEQ ID NO: 3224 - DNA, 21 bp, Homo sapiens
cagcaggtgtatactacgtga

SEQ ID NO: 3225 - DNA, 21 bp, Homo sapiens
atcgggtgacctggccaagaa

SEQ ID NO: 3226 - DNA, 21 bp, Homo sapiens
caccaagatgatgaccaagaa

SEQ ID NO: 3227 - DNA, 21 bp, Homo sapiens
ctgcgttatcctcaccttcaa

SEQ ID NO: 3228 - DNA, 21 bp, Homo sapiens
cagcctctctgctataagaaa

SEQ ID NO: 3229 - DNA, 21 bp, Homo sapiens
ttggatataggtgggaagaaa

SEQ ID NO: 3230 - DNA, 21 bp, Homo sapiens
ccgggtggcgctggaagttat

SEQ ID NO: 3231 - DNA, 21 bp, Homo sapiens
caggttaaagctgaagctcaa

SEQ ID NO: 3232 - DNA, 21 bp, Homo sapiens
gagggttagcgttagccttaa

SEQ ID NO: 3233 - DNA, 21 bp, Homo sapiens
gaggatcatgctgttcaccaa

SEQ ID NO: 3234 - DNA, 21 bp, Homo sapiens
cgcctagtgagcagtagccaa

SEQ ID NO: 3235 - DNA, 21 bp, Homo sapiens
tacaatgaggttaacaattca

SEQ ID NO: 3236 - DNA, 21 bp, Homo sapiens
cccgactgagaccaagaccta

SEQ ID NO: 3237 - DNA, 21 bp, Homo sapiens
cagagataatccggtctagta

SEQ ID NO: 3238 - DNA, 21 bp, Homo sapiens
ccctcaattcatatttatgaa

SEQ ID NO: 3239 - DNA, 21 bp, Homo sapiens
tcctataatgtaataccttta

SEQ ID NO: 3240 - DNA, 21 bp, Homo sapiens
tacctatttcctgaacgataa

SEQ ID NO: 3241 - DNA, 21 bp, Homo sapiens
cagaagcacaatgctagccta

SEQ ID NO: 3242 - DNA, 21 bp, Homo sapiens
atccctcagctttaagcttaa

SEQ ID NO: 3243 - DNA, 21 bp, Homo sapiens
ccgcggcaccagagcgatgaa

SEQ ID NO: 3244 - DNA, 21 bp, Homo sapiens
atcggaggacatcgtctacta

SEQ ID NO: 3245 - DNA, 21 bp, Homo sapiens
caccttcatcgtgaacgccaa

SEQ ID NO: 3246 - DNA, 21 bp, Homo sapiens
cacggagctgatgaacttcaa

SEQ ID NO: 3247 - DNA, 21 bp, Homo sapiens
ccgcatctacaaggatggcaa

SEQ ID NO: 3248 - DNA, 21 bp, Homo sapiens
caggcattactcgccattgat

SEQ ID NO: 3249 - DNA, 21 bp, Homo sapiens
cagcagaccatttcaaattat

SEQ ID NO: 3250 - DNA, 21 bp, Homo sapiens
cactctaaccatcacaatcaa

SEQ ID NO: 3251 - DNA, 21 bp, Homo sapiens
caccatcagatcataagcata

SEQ ID NO: 3252 - DNA, 21 bp, Homo sapiens
caccctaaggttgacaattga

SEQ ID NO: 3253 - DNA, 21 bp, Homo sapiens
taggagtgaagccaacgttaa

SEQ ID NO: 3254 - DNA, 21 bp, Homo sapiens
tagattcataatgcaattaga

SEQ ID NO: 3255 - DNA, 21 bp, Homo sapiens
tagattggtcttacagtttga

SEQ ID NO: 3256 - DNA, 21 bp, Homo sapiens
aagtggcttagcttaagtaaa

SEQ ID NO: 3257 - DNA, 21 bp, Homo sapiens
gagcccaagattacaaatgta

SEQ ID NO: 3258 - DNA, 21 bp, Homo sapiens
cagaaataaaccaaggctcta

SEQ ID NO: 3259 - DNA, 21 bp, Homo sapiens
cagggttacagtaactgcaat

SEQ ID NO: 3260 - DNA, 21 bp, Homo sapiens
caccaccaaactggctttcta

SEQ ID NO: 3261 - DNA, 21 bp, Homo sapiens
acgtgctctcttgaaattgaa

SEQ ID NO: 3262 - DNA, 21 bp, Homo sapiens
cagaaataactgtataatgaa

SEQ ID NO: 3263 - DNA, 21 bp, Homo sapiens
acgggcggcatcggaaacaaa

SEQ ID NO: 3264 - DNA, 21 bp, Homo sapiens
cgccttggacaagatttataa

SEQ ID NO: 3265 - DNA, 21 bp, Homo sapiens
aagtttcgatagatcaaccaa

SEQ ID NO: 3266 - DNA, 21 bp, Homo sapiens
caacctgttcttcctaccaaa

SEQ ID NO: 3267 - DNA, 21 bp, Homo sapiens
cacgcagtacacggtcttcca

SEQ ID NO: 3268 - DNA, 21 bp, Homo sapiens
aaggcctaactatgcctcgaa

SEQ ID NO: 3269 - DNA, 21 bp, Homo sapiens
cccgtggttgtctgtacagaa

SEQ ID NO: 3270 - DNA, 21 bp, Homo sapiens
acgcgtgtgacattcaagaaa

SEQ ID NO: 3271 - DNA, 21 bp, Homo sapiens
ttcaaggtggttgatgttata

SEQ ID NO: 3272 - DNA, 21 bp, Homo sapiens
tacactcacgttaactattaa

SEQ ID NO: 3273 - DNA, 21 bp, Homo sapiens
cagtattataggagactacaa

SEQ ID NO: 3274 - DNA, 21 bp, Homo sapiens
taggaatttataagagtctaa

SEQ ID NO: 3275 - DNA, 21 bp, Homo sapiens
tcctaggttactgaagctaaa

SEQ ID NO: 3276 - DNA, 21 bp, Homo sapiens
ctggaggaactccgaacccaa

SEQ ID NO: 3277 - DNA, 21 bp, Homo sapiens
tgcgcgagtgctccagtttaa

SEQ ID NO: 3278 - DNA, 21 bp, Homo sapiens
aaagctctctatgcttcataa

SEQ ID NO: 3279 - DNA, 21 bp, Homo sapiens
ctggagtttgagactatggaa

SEQ ID NO: 3280 - DNA, 21 bp, Homo sapiens
aaccaacagtataaagcctaa

SEQ ID NO: 3281 - DNA, 21 bp, Homo sapiens
caccgacattaagaactacta

SEQ ID NO: 3282 - DNA, 21 bp, Homo sapiens
atgcataagtatatttgttta

SEQ ID NO: 3283 - DNA, 21 bp, Homo sapiens
tagaatgtacacagatccaaa

SEQ ID NO: 3284 - DNA, 21 bp, Homo sapiens
caggtcaattatcaaagacta

SEQ ID NO: 3285 - DNA, 21 bp, Homo sapiens
ccactaataattaaccatcta

SEQ ID NO: 3286 - DNA, 21 bp, Homo sapiens
accgagcgtacaggtcaatta

SEQ ID NO: 3287 - DNA, 21 bp, Homo sapiens
ccggaattacttgcagggcta

SEQ ID NO: 3288 - DNA, 21 bp, Homo sapiens
ccagaacagaagttccagaaa

SEQ ID NO: 3289 - DNA, 21 bp, Homo sapiens
cagggctaacctagtgcctat

SEQ ID NO: 3290 - DNA, 21 bp, Homo sapiens
aagaaggaatcggatataaca

SEQ ID NO: 3291 - DNA, 21 bp, Homo sapiens
ccgcaatgccatccacgcgaa

SEQ ID NO: 3292 - DNA, 21 bp, Homo sapiens
cagctccgtgctggtcattga

SEQ ID NO: 3293 - DNA, 21 bp, Homo sapiens
ctccaacaataaagagctcaa

SEQ ID NO: 3294 - DNA, 21 bp, Homo sapiens
caacagaaccttcgacaagta

SEQ ID NO: 3295 - DNA, 21 bp, Homo sapiens
ctggacaagcatcagatgaaa

SEQ ID NO: 3296 - DNA, 21 bp, Homo sapiens
cacgatgatctcctgctacta

SEQ ID NO: 3297 - DNA, 21 bp, Homo sapiens
cagctgtatgagaagctcata

SEQ ID NO: 3298 - DNA, 21 bp, Homo sapiens
caggactttgatgcatttcca

SEQ ID NO: 3299 - DNA, 21 bp, Homo sapiens
atcagtggaactgctatttaa

SEQ ID NO: 3300 - DNA, 21 bp, Homo sapiens
caagtcagtcttgctgtacaa

SEQ ID NO: 3301 - DNA, 21 bp, Homo sapiens
taccgttgaacacttactcaa

SEQ ID NO: 3302 - DNA, 21 bp, Homo sapiens
cagctggtattcccttcacta

SEQ ID NO: 3303 - DNA, 21 bp, Homo sapiens
agcgctcgaggtgctatgcaa

SEQ ID NO: 3304 - DNA, 21 bp, Homo sapiens
aacaggataatcgtggtgtaa

SEQ ID NO: 3305 - DNA, 21 bp, Homo sapiens
cacggaaagaactctgtttaa

SEQ ID NO: 3306 - DNA, 21 bp, Homo sapiens
tagtaacgtgggaatactaaa

SEQ ID NO: 3307 - DNA, 21 bp, Homo sapiens
atccactgaccaaatccttaa

SEQ ID NO: 3308 - DNA, 21 bp, Homo sapiens
acccttatcttgcaaagtgaa

SEQ ID NO: 3309 - DNA, 21 bp, Homo sapiens
ctctagtgtatttcacagaaa

SEQ ID NO: 3310 - DNA, 21 bp, Homo sapiens
ccgcatcaagttgtacagtga

SEQ ID NO: 3311 - DNA, 21 bp, Homo sapiens
cgggactttaagatgaagtta

SEQ ID NO: 3312 - DNA, 21 bp, Homo sapiens
ctggagttaatgtccaaccta

SEQ ID NO: 3313 - DNA, 21 bp, Homo sapiens
ctggtttaccatattctaaga

SEQ ID NO: 3314 - DNA, 21 bp, Homo sapiens
cgcgctgagcagtgactcaaa

SEQ ID NO: 3315 - DNA, 21 bp, Homo sapiens
atggcccagttcatacattta

SEQ ID NO: 3316 - DNA, 21 bp, Homo sapiens
ccgggcctgcgtcgacttcaa

SEQ ID NO: 3317 - DNA, 21 bp, Homo sapiens
ccgcctgcttcccaagtataa

SEQ ID NO: 3318 - DNA, 21 bp, Homo sapiens
cagacctttcttagacgccaa

SEQ ID NO: 3319 - DNA, 21 bp, Homo sapiens
tacgtctatgtcaacactaca

SEQ ID NO: 3320 - DNA, 21 bp, Homo sapiens
caggaagaggttagacgcaat

SEQ ID NO: 3321 - DNA, 21 bp, Homo sapiens
ctccctctactcagccttaaa

SEQ ID NO: 3322 - DNA, 21 bp, Homo sapiens
ctcaatgacgttgctcattaa

SEQ ID NO: 3323 - DNA, 21 bp, Homo sapiens
ctgcacagacatgagaccata

SEQ ID NO: 3324 - DNA, 21 bp, Homo sapiens
tgcctgaaatgttacacatta

SEQ ID NO: 3325 - DNA, 21 bp, Homo sapiens
tggcatctgcatcatcctcaa

SEQ ID NO: 3326 - DNA, 21 bp, Homo sapiens
gcctgaaatgttacacattaa

SEQ ID NO: 3327 - DNA, 21 bp, Homo sapiens
ccagaggatgtttgaaattga

SEQ ID NO: 3328 - DNA, 21 bp, Homo sapiens
accactgatggagcacataaa

SEQ ID NO: 3329 - DNA, 21 bp, Homo sapiens
cagaatggagggccagttata

SEQ ID NO: 3330 - DNA, 21 bp, Homo sapiens
caccaaagtttgcatatggaa

SEQ ID NO: 3331 - DNA, 21 bp, Homo sapiens
caggaactccaacatgaacta

SEQ ID NO: 3332 - DNA, 21 bp, Homo sapiens
cagactcaaactcaaggtcaa

SEQ ID NO: 3333 - DNA, 21 bp, Homo sapiens
ccagacagagccgcaaatcaa

SEQ ID NO: 3334 - DNA, 21 bp, Homo sapiens
caggctcgttcgtgaatgtca

SEQ ID NO: 3335 - DNA, 21 bp, Homo sapiens
ctggagtttaacaaacagcaa

SEQ ID NO: 3336 - DNA, 21 bp, Homo sapiens
tcggatttcctggataagcta

SEQ ID NO: 3337 - DNA, 21 bp, Homo sapiens
cccataactcgtggactacaa

SEQ ID NO: 3338 - DNA, 21 bp, Homo sapiens
ccgctttaacttctctgccta

SEQ ID NO: 3339 - DNA, 21 bp, Homo sapiens
caagcctaaccttgactcaaa

SEQ ID NO: 3340 - DNA, 21 bp, Homo sapiens
cctatagaaataataaatgaa

SEQ ID NO: 3341 - DNA, 21 bp, Homo sapiens
cagtgaatgcctatagaaata

SEQ ID NO: 3342 - DNA, 21 bp, Homo sapiens
cagaatttgcttaccataatt

SEQ ID NO: 3343 - DNA, 21 bp, Homo sapiens
tagctatactgtgtacacata

SEQ ID NO: 3344 - DNA, 21 bp, Homo sapiens
gaggtagttgtgcctcaatta

SEQ ID NO: 3345 - DNA, 21 bp, Homo sapiens
gtccgtttaactcgatagaaa

SEQ ID NO: 3346 - DNA, 21 bp, Homo sapiens
ccggatcggccagctgaatta

SEQ ID NO: 3347 - DNA, 21 bp, Homo sapiens
ctccgtgcgggctgaaattaa

SEQ ID NO: 3348 - DNA, 21 bp, Homo sapiens
ccggtttgcggacgagagaaa

SEQ ID NO: 3349 - DNA, 21 bp, Homo sapiens
gaggttcatcctggacatgta

SEQ ID NO: 3350 - DNA, 21 bp, Homo sapiens
tccgtgcgggctgaaattaaa

SEQ ID NO: 3351 - DNA, 21 bp, Homo sapiens
caccgacacgcagaacgtcaa

SEQ ID NO: 3352 - DNA, 21 bp, Homo sapiens
cagcatctgtttcccggacta

SEQ ID NO: 3353 - DNA, 21 bp, Homo sapiens
acgcacagactcagcaataaa

SEQ ID NO: 3354 - DNA, 21 bp, Homo sapiens
acgcgccatgaccacactcaa

SEQ ID NO: 3355 - DNA, 21 bp, Homo sapiens
tagggagtctcagtcaatgta

SEQ ID NO: 3356 - DNA, 21 bp, Homo sapiens
aaccaattagaacgaattaca

SEQ ID NO: 3357 - DNA, 21 bp, Homo sapiens
acggcaaatatgggaagtgga

SEQ ID NO: 3358 - DNA, 21 bp, Homo sapiens
tgggatagctattgcagctta

SEQ ID NO: 3359 - DNA, 21 bp, Homo sapiens
cgcctgtgatgcctctatcaa

SEQ ID NO: 3360 - DNA, 21 bp, Homo sapiens
cggccatgaatccgacatcaa

SEQ ID NO: 3361 - DNA, 21 bp, Homo sapiens
cagattgcagatgccaggaaa

SEQ ID NO: 3362 - DNA, 21 bp, Homo sapiens
tccgggtgccattcccactaa

SEQ ID NO: 3363 - DNA, 21 bp, Homo sapiens
caacatgtgttccatctacaa

SEQ ID NO: 3364 - DNA, 21 bp, Homo sapiens
tcccttaatgagcaaggacaa

SEQ ID NO: 3365 - DNA, 21 bp, Homo sapiens
ctcggtgacctgctcagacaa

SEQ ID NO: 3366 - DNA, 21 bp, Homo sapiens
gtggaacagcttaagattgaa

SEQ ID NO: 3367 - DNA, 21 bp, Homo sapiens
ctggagctactgggagggtaa

SEQ ID NO: 3368 - DNA, 21 bp, Homo sapiens
caagatggtggaacagcttaa

SEQ ID NO: 3369 - DNA, 21 bp, Homo sapiens
cagggcatcattcagtaatta

SEQ ID NO: 3370 - DNA, 21 bp, Homo sapiens
acggctaaactcggattgtga

SEQ ID NO: 3371 - DNA, 21 bp, Homo sapiens
atggttgaacccgtcgctaaa

SEQ ID NO: 3372 - DNA, 21 bp, Homo sapiens
acgcatccatctccaagttaa

SEQ ID NO: 3373 - DNA, 21 bp, Homo sapiens
tcggctttccactaaggtcaa

SEQ ID NO: 3374 - DNA, 21 bp, Homo sapiens
ccaggctacagtgaacagaaa

SEQ ID NO: 3375 - DNA, 21 bp, Homo sapiens
accagtattgatgaataacta

SEQ ID NO: 3376 - DNA, 21 bp, Homo sapiens
caggttgtcagacccagtaaa

SEQ ID NO: 3377 - DNA, 21 bp, Homo sapiens
acggttgcatttgccacttca

SEQ ID NO: 3378 - DNA, 21 bp, Homo sapiens
aagcatggattggatcagtaa

SEQ ID NO: 3379 - DNA, 21 bp, Homo sapiens
cggcggcatgacaccgctaaa

SEQ ID NO: 3380 - DNA, 21 bp, Homo sapiens
aagcaagatgctggttgccaa

SEQ ID NO: 3381 - DNA, 21 bp, Homo sapiens
ctggttaattaggcaagccaa

SEQ ID NO: 3382 - DNA, 21 bp, Homo sapiens
atcagtcaacttccacattaa

SEQ ID NO: 3383 - DNA, 21 bp, Homo sapiens
cggaaactttagagaagttaa

SEQ ID NO: 3384 - DNA, 21 bp, Homo sapiens
ctggccgattacagaactgaa

SEQ ID NO: 3385 - DNA, 21 bp, Homo sapiens
ttgatgggaccttgaaagcaa

SEQ ID NO: 3386 - DNA, 21 bp, Homo sapiens
ccagaactacacgaatcctta

SEQ ID NO: 3387 - DNA, 21 bp, Homo sapiens
cacaggcttggtattaacaga

SEQ ID NO: 3388 - DNA, 21 bp, Homo sapiens
caggacctcaatagttctgat

SEQ ID NO: 3389 - DNA, 21 bp, Homo sapiens
ttgagtccttgtatgaataaa

SEQ ID NO: 3390 - DNA, 21 bp, Homo sapiens
tacaacacagacgatatttaa

SEQ ID NO: 3391 - DNA, 21 bp, Homo sapiens
cagggacacgctcacggccaa

SEQ ID NO: 3392 - DNA, 21 bp, Homo sapiens
ccgccagatctacggagccaa

SEQ ID NO: 3393 - DNA, 21 bp, Homo sapiens
ccgggacactgtggagttcaa

SEQ ID NO: 3394 - DNA, 21 bp, Homo sapiens
ctcagttgctgagatactcaa

SEQ ID NO: 3395 - DNA, 21 bp, Homo sapiens
ccgactccactttcatagtta

SEQ ID NO: 3396 - DNA, 21 bp, Homo sapiens
aagccttaagtcttaatatta

SEQ ID NO: 3397 - DNA, 21 bp, Homo sapiens
cccagaagaaacttcagttta

SEQ ID NO: 3398 - DNA, 21 bp, Homo sapiens
cagctattcttcagcttggta

SEQ ID NO: 3399 - DNA, 21 bp, Homo sapiens
ttgcggcaagaacactattta

SEQ ID NO: 3400 - DNA, 21 bp, Homo sapiens
ttcagtttatttggattatta

SEQ ID NO: 3401 - DNA, 21 bp, Homo sapiens
taggttgggcctataaatata

SEQ ID NO: 3402 - DNA, 21 bp, Homo sapiens
ttgggaaactaggttctataa

SEQ ID NO: 3403 - DNA, 21 bp, Homo sapiens
gggcctataaatatagaacaa

SEQ ID NO: 3404 - DNA, 21 bp, Homo sapiens
aggaagtgagtgatcaaacaa

SEQ ID NO: 3405 - DNA, 21 bp, Homo sapiens
gcgcatcatcttcgccatcga

SEQ ID NO: 3406 - DNA, 21 bp, Homo sapiens
cagggacgacagttccgtgtt

SEQ ID NO: 3407 - DNA, 21 bp, Homo sapiens
ctgcgccaacccgctcatcta

SEQ ID NO: 3408 - DNA, 21 bp, Homo sapiens
ccggaggaactcgctgcgcat

SEQ ID NO: 3409 - DNA, 21 bp, Homo sapiens
ctgaatagattcagtcattat

SEQ ID NO: 3410 - DNA, 21 bp, Homo sapiens
aaggagggcataattccacaa

SEQ ID NO: 3411 - DNA, 21 bp, Homo sapiens
tgcgactattaccaaatagaa

SEQ ID NO: 3412 - DNA, 21 bp, Homo sapiens
tcaggcgaacctgaactttaa

SEQ ID NO: 3413 - DNA, 21 bp, Homo sapiens
caggcagatcccaggagagaa

SEQ ID NO: 3414 - DNA, 21 bp, Homo sapiens
caggaccatgaatggcaccta

SEQ ID NO: 3415 - DNA, 21 bp, Homo sapiens
cgccctgtacataaccagcaa

SEQ ID NO: 3416 - DNA, 21 bp, Homo sapiens
ccggcacaatttcaactccat

SEQ ID NO: 3417 - DNA, 21 bp, Homo sapiens
aagcctttgaggaatgtacta

SEQ ID NO: 3418 - DNA, 21 bp, Homo sapiens
caccgcagatgaagacttcta

SEQ ID NO: 3419 - DNA, 21 bp, Homo sapiens
ccgggtgtttcaaagacatca

SEQ ID NO: 3420 - DNA, 21 bp, Homo sapiens
caggatgttactcaccaagaa

SEQ ID NO: 3421 - DNA, 21 bp, Homo sapiens
ccggaggtggtgaagaatgaa

SEQ ID NO: 3422 - DNA, 21 bp, Homo sapiens
cagagactcttcagtcgccaa

SEQ ID NO: 3423 - DNA, 21 bp, Homo sapiens
aggcatgtgggcggcacgtaa

SEQ ID NO: 3424 - DNA, 21 bp, Homo sapiens
aaggatgttctggacattgaa

SEQ ID NO: 3425 - DNA, 21 bp, Homo sapiens
caggagaacgccaagaacgaa

SEQ ID NO: 3426 - DNA, 21 bp, Homo sapiens
gaggaacaccttgatcttaca

SEQ ID NO: 3427 - DNA, 21 bp, Homo sapiens
ccgggactacacccagatgaa

SEQ ID NO: 3428 - DNA, 21 bp, Homo sapiens
aacaccttgatcttacagaaa

SEQ ID NO: 3429 - DNA, 21 bp, Homo sapiens
cgggagtggatctgaaataaa

SEQ ID NO: 3430 - DNA, 21 bp, Homo sapiens
cccaacaagcttcgaaatgga

SEQ ID NO: 3431 - DNA, 21 bp, Homo sapiens
cgccaagtacgaactgttcaa

SEQ ID NO: 3432 - DNA, 21 bp, Homo sapiens
cacactggtatatcccatgaa

SEQ ID NO: 3433 - DNA, 21 bp, Homo sapiens
cagcgattgattattcagcaa

SEQ ID NO: 3434 - DNA, 21 bp, Homo sapiens
cagaagtgacttattaaacta

SEQ ID NO: 3435 - DNA, 21 bp, Homo sapiens
gcaggtcttgttgccaattta

SEQ ID NO: 3436 - DNA, 21 bp, Homo sapiens
cagggttacattgtaatatat

SEQ ID NO: 3437 - DNA, 21 bp, Homo sapiens
ccgggtttaggacgtggtcaa

SEQ ID NO: 3438 - DNA, 21 bp, Homo sapiens
caggaaagatttggtgttgta

SEQ ID NO: 3439 - DNA, 21 bp, Homo sapiens
caggtgcgatttgaaggttta

SEQ ID NO: 3440 - DNA, 21 bp, Homo sapiens
cagcatccgaaagattggtta

SEQ ID NO: 3441 - DNA, 21 bp, Homo sapiens
ctccacgtgattgaaatgaaa

SEQ ID NO: 3442 - DNA, 21 bp, Homo sapiens
caccatgaaggtgggaggtaa

SEQ ID NO: 3443 - DNA, 21 bp, Homo sapiens
aagcaatggatcggagaacaa

SEQ ID NO: 3444 - DNA, 21 bp, Homo sapiens
cacgattacaaatgggatcaa

SEQ ID NO: 3445 - DNA, 21 bp, Homo sapiens
aacgatgtggacgtacaggaa

SEQ ID NO: 3446 - DNA, 21 bp, Homo sapiens
ctggcagaaattcattatatt

SEQ ID NO: 3447 - DNA, 21 bp, Homo sapiens
ccagcattaacagaaaccgaa

SEQ ID NO: 3448 - DNA, 21 bp, Homo sapiens
tgggcatatcacctttaataa

SEQ ID NO: 3449 - DNA, 21 bp, Homo sapiens
acaggtctaattcgtctacaa

SEQ ID NO: 3450 - DNA, 21 bp, Homo sapiens
acggatttagaatgtggtaaa

SEQ ID NO: 3451 - DNA, 21 bp, Homo sapiens
ccggcaattccttatctccaa

SEQ ID NO: 3452 - DNA, 21 bp, Homo sapiens
cgcgttcatatgggacgcaaa

SEQ ID NO: 3453 - DNA, 21 bp, Homo sapiens
tgggatggtgtcagcctatta

SEQ ID NO: 3454 - DNA, 21 bp, Homo sapiens
cagggtgttgaattccaacta

SEQ ID NO: 3455 - DNA, 21 bp, Homo sapiens
gacgcgttcggtcctattaaa

SEQ ID NO: 3456 - DNA, 21 bp, Homo sapiens
caaggaggagttcacagtcaa

SEQ ID NO: 3457 - DNA, 21 bp, Homo sapiens
cagactgaagattgtgacgat

SEQ ID NO: 3458 - DNA, 21 bp, Homo sapiens
cacgctggactcgttcatgca

SEQ ID NO: 3459 - DNA, 21 bp, Homo sapiens
tacgataacattgtcgacaaa

SEQ ID NO: 3460 - DNA, 21 bp, Homo sapiens
cacagtggccattgtagttta

SEQ ID NO: 3461 - DNA, 21 bp, Homo sapiens
accagataggtgagtccttaa

SEQ ID NO: 3462 - DNA, 21 bp, Homo sapiens
agggttgtatagtatctgtta

SEQ ID NO: 3463 - DNA, 21 bp, Homo sapiens
caccaccgaagaggtgtttaa

SEQ ID NO: 3464 - DNA, 21 bp, Homo sapiens
caggatgttctgggagaggaa

SEQ ID NO: 3465 - DNA, 21 bp, Homo sapiens
caaggtttccatcgtgagcaa

SEQ ID NO: 3466 - DNA, 21 bp, Homo sapiens
cagcctaaggaggaacactaa

SEQ ID NO: 3467 - DNA, 21 bp, Homo sapiens
ccgctacaacatcttcaccta

SEQ ID NO: 3468 - DNA, 21 bp, Homo sapiens
ctgcacgctttatgccttcaa

SEQ ID NO: 3469 - DNA, 21 bp, Homo sapiens
ctacaaggactttgtgctcaa

SEQ ID NO: 3470 - DNA, 21 bp, Homo sapiens
caccatcgagctggcctccta

SEQ ID NO: 3471 - DNA, 21 bp, Homo sapiens
cacggctccattcaacccaaa

SEQ ID NO: 3472 - DNA, 21 bp, Homo sapiens
taggtccttgttgtaactaat

SEQ ID NO: 3473 - DNA, 21 bp, Homo sapiens
tacggtggcaatattatgtaa

SEQ ID NO: 3474 - DNA, 21 bp, Homo sapiens
gtccttgttgtaactaattta

SEQ ID NO: 3475 - DNA, 21 bp, Homo sapiens
aagggtttgatgcctacttta

SEQ ID NO: 3476 - DNA, 21 bp, Homo sapiens
cacgcttacaatctccatgaa

SEQ ID NO: 3477 - DNA, 21 bp, Homo sapiens
tcggatttatcgcatatttga

SEQ ID NO: 3478 - DNA, 21 bp, Homo sapiens
cccagattagttatgcatcaa

SEQ ID NO: 3479 - DNA, 21 bp, Homo sapiens
cgggtgtaaatagattgttat

SEQ ID NO: 3480 - DNA, 21 bp, Homo sapiens
caataaattattggcatgaaa

SEQ ID NO: 3481 - DNA, 21 bp, Homo sapiens
ccgggtgtaaatagattgtta

SEQ ID NO: 3482 - DNA, 21 bp, Homo sapiens
cagggaactagtcgccatcaa

SEQ ID NO: 3483 - DNA, 21 bp, Homo sapiens
cacgtttggaaagaatattaa

SEQ ID NO: 3484 - DNA, 21 bp, Homo sapiens
ctgcatttatcgttaacctaa

SEQ ID NO: 3485 - DNA, 21 bp, Homo sapiens
cactcaagaactgtcaagtaa

SEQ ID NO: 3486 - DNA, 21 bp, Homo sapiens
aacactggtcacgtttggaaa

SEQ ID NO: 3487 - DNA, 21 bp, Homo sapiens
ccaccgtatatttgagcccaa

SEQ ID NO: 3488 - DNA, 21 bp, Homo sapiens
tccagaatttgagaaactgaa

SEQ ID NO: 3489 - DNA, 21 bp, Homo sapiens
cagactcaagctatgaggaaa

SEQ ID NO: 3490 - DNA, 21 bp, Homo sapiens
ctgctacaatccagaatttga

SEQ ID NO: 3491 - DNA, 21 bp, Homo sapiens
aacggaagaagttacccttaa

SEQ ID NO: 3492 - DNA, 21 bp, Homo sapiens
atggctggatgtgaaattcaa

SEQ ID NO: 3493 - DNA, 21 bp, Homo sapiens
cctcatctacaccaactatga

SEQ ID NO: 3494 - DNA, 21 bp, Homo sapiens
tcctttctccaggaccaataa

SEQ ID NO: 3495 - DNA, 21 bp, Homo sapiens
gccgccctacaccgtggtcta

SEQ ID NO: 3496 - DNA, 21 bp, Homo sapiens
ccagatctccttcgctgacta

SEQ ID NO: 3497 - DNA, 21 bp, Homo sapiens
taccatcagctccatcaacaa

SEQ ID NO: 3498 - DNA, 21 bp, Homo sapiens
acggtgcccatcaatctcata

SEQ ID NO: 3499 - DNA, 21 bp, Homo sapiens
ctgaaatttggcgtgaattaa

SEQ ID NO: 3500 - DNA, 21 bp, Homo sapiens
cgcgctgaaatttggcgtgaa

SEQ ID NO: 3501 - DNA, 21 bp, Homo sapiens
cagcagggctataatgtatga

SEQ ID NO: 3502 - DNA, 21 bp, Homo sapiens
ccgaagttgtagagcttctaa

SEQ ID NO: 3503 - DNA, 21 bp, Homo sapiens
aagcctattgtgtgcttgtta

SEQ ID NO: 3504 - DNA, 21 bp, Homo sapiens
atcgccattgttcgagattta

SEQ ID NO: 3505 - DNA, 21 bp, Homo sapiens
cagcttctactgcaagttcaa

SEQ ID NO: 3506 - DNA, 21 bp, Homo sapiens
caggaactctttgacacagaa

SEQ ID NO: 3507 - DNA, 21 bp, Homo sapiens
ttgcctgttgtacatagccta

SEQ ID NO: 3508 - DNA, 21 bp, Homo sapiens
ttgacgaatttggcaattcta

SEQ ID NO: 3509 - DNA, 21 bp, Homo sapiens
ccagtgtggatttgattacaa

SEQ ID NO: 3510 - DNA, 21 bp, Homo sapiens
acgtcaaattcttgaatacaa

SEQ ID NO: 3511 - DNA, 21 bp, Homo sapiens
aaggcaaagatagatttacaa

SEQ ID NO: 3512 - DNA, 21 bp, Homo sapiens
cccagagctgatgctattgta

SEQ ID NO: 3513 - DNA, 21 bp, Homo sapiens
tcggctgaatacagggtcaaa

SEQ ID NO: 3514 - DNA, 21 bp, Homo sapiens
atggcacagggtagaccttaa

SEQ ID NO: 3515 - DNA, 21 bp, Homo sapiens
cagcatccgcagatttatcaa

SEQ ID NO: 3516 - DNA, 21 bp, Homo sapiens
cagtgtgcacgcagtctataa

SEQ ID NO: 3517 - DNA, 21 bp, Homo sapiens
cgcagatttatcaacagtcaa

SEQ ID NO: 3518 - DNA, 21 bp, Homo sapiens
ccgatgttcagaggcatccaa

SEQ ID NO: 3519 - DNA, 21 bp, Homo sapiens
caggaaagaggatgaacttaa

SEQ ID NO: 3520 - DNA, 21 bp, Homo sapiens
caggcctatctcaactataaa

SEQ ID NO: 3521 - DNA, 21 bp, Homo sapiens
cagtttcttgtcagaataata

SEQ ID NO: 3522 - DNA, 21 bp, Homo sapiens
caagactttcttctagatata

SEQ ID NO: 3523 - DNA, 21 bp, Homo sapiens
aagggtcaaatgatctactta

SEQ ID NO: 3524 - DNA, 21 bp, Homo sapiens
acctaacatggtgatctgcaa

SEQ ID NO: 3525 - DNA, 21 bp, Homo sapiens
caggcagacagaattcgcata

SEQ ID NO: 3526 - DNA, 21 bp, Homo sapiens
accgttgtttggaaccatcta

SEQ ID NO: 3527 - DNA, 21 bp, Homo sapiens
ctggagttcgatcaagtttca

SEQ ID NO: 3528 - DNA, 21 bp, Homo sapiens
aaggcagttggtgagaaacaa

SEQ ID NO: 3529 - DNA, 21 bp, Homo sapiens
ctgggcgaggagcgtaactaa

SEQ ID NO: 3530 - DNA, 21 bp, Homo sapiens
ccgctatgagttctccaacaa

SEQ ID NO: 3531 - DNA, 21 bp, Homo sapiens
acccaagaaagcggcacccaa

SEQ ID NO: 3532 - DNA, 21 bp, Homo sapiens
caggtttataccactttattt

SEQ ID NO: 3533 - DNA, 21 bp, Homo sapiens
ctggtccgtgcgggaaattca

SEQ ID NO: 3534 - DNA, 21 bp, Homo sapiens
atcggacattctaatgcatat

SEQ ID NO: 3535 - DNA, 21 bp, Homo sapiens
tcagtcttgatttaaccttaa

SEQ ID NO: 3536 - DNA, 21 bp, Homo sapiens
acaagtatttattcccataaa

SEQ ID NO: 3537 - DNA, 21 bp, Homo sapiens
gtggaagattggtacaatcaa

SEQ ID NO: 3538 - DNA, 21 bp, Homo sapiens
cagctcgatctaagtgcctta

SEQ ID NO: 3539 - DNA, 21 bp, Homo sapiens
ccagctagtaggtctcataaa

SEQ ID NO: 3540 - DNA, 21 bp, Homo sapiens
aacgcaattggtcttgtccaa

SEQ ID NO: 3541 - DNA, 21 bp, Homo sapiens
caccttctcgtgcatcatgca

SEQ ID NO: 3542 - DNA, 21 bp, Homo sapiens
taccagttcatccacacggaa

SEQ ID NO: 3543 - DNA, 21 bp, Homo sapiens
caacgccaagttcgctttcaa

SEQ ID NO: 3544 - DNA, 21 bp, Homo sapiens
cccaaggagggtacacaacta

SEQ ID NO: 3545 - DNA, 21 bp, Homo sapiens
tggcatcatttacgtagttta

SEQ ID NO: 3546 - DNA, 21 bp, Homo sapiens
tgggctaatgttagggcttaa

SEQ ID NO: 3547 - DNA, 21 bp, Homo sapiens
ccgggatagcgagaccactaa

SEQ ID NO: 3548 - DNA, 21 bp, Homo sapiens
cggcagggagataccgtgaaa

SEQ ID NO: 3549 - DNA, 21 bp, Homo sapiens
cgggagcacatcagaggctta

SEQ ID NO: 3550 - DNA, 21 bp, Homo sapiens
aacgacgggctctgccagaaa

SEQ ID NO: 3551 - DNA, 21 bp, Homo sapiens
cagccagtgatagctatggaa

SEQ ID NO: 3552 - DNA, 21 bp, Homo sapiens
aaggagaagtggagaagcata

SEQ ID NO: 3553 - DNA, 21 bp, Homo sapiens
cccgtgatgtccggcaccaaa

SEQ ID NO: 3554 - DNA, 21 bp, Homo sapiens
ccggaagtccttgaccactca

SEQ ID NO: 3555 - DNA, 21 bp, Homo sapiens
ccggtgcaacatcgcctgtaa

SEQ ID NO: 3556 - DNA, 21 bp, Homo sapiens
accgactatgacgacgaggaa

SEQ ID NO: 3557 - DNA, 21 bp, Homo sapiens
gacccataacttgctgttaaa

SEQ ID NO: 3558 - DNA, 21 bp, Homo sapiens
ctgggttgtttcaatctaaca

SEQ ID NO: 3559 - DNA, 21 bp, Homo sapiens
tcccaatgagttgccatataa

SEQ ID NO: 3560 - DNA, 21 bp, Homo sapiens
acggtcaataagaccagataa

SEQ ID NO: 3561 - DNA, 21 bp, Homo sapiens
tgccgactccttcacctttaa

SEQ ID NO: 3562 - DNA, 21 bp, Homo sapiens
ccacaataggatacaaacgaa

SEQ ID NO: 3563 - DNA, 21 bp, Homo sapiens
ctgggtcaaggacaagtacaa

SEQ ID NO: 3564 - DNA, 21 bp, Homo sapiens
cagcttgtgacatgatatata

SEQ ID NO: 3565 - DNA, 21 bp, Homo sapiens
ccagcttatagtcatatatat

SEQ ID NO: 3566 - DNA, 21 bp, Homo sapiens
gagggagcaattgaatttcaa

SEQ ID NO: 3567 - DNA, 21 bp, Homo sapiens
ttcgacgatatcatggctata

SEQ ID NO: 3568 - DNA, 21 bp, Homo sapiens
tggatattattgcaaccataa

SEQ ID NO: 3569 - DNA, 21 bp, Homo sapiens
ccagacattatctgccagtta

SEQ ID NO: 3570 - DNA, 21 bp, Homo sapiens
ccgggcacaatagttgaagta

SEQ ID NO: 3571 - DNA, 21 bp, Homo sapiens
caggttagggtgctagagcta

SEQ ID NO: 3572 - DNA, 21 bp, Homo sapiens
cacaacaatgggtatccttaa

SEQ ID NO: 3573 - DNA, 21 bp, Homo sapiens
caggaacttgccacaagccaa

SEQ ID NO: 3574 - DNA, 21 bp, Homo sapiens
atggcttaggatcgacaagaa

SEQ ID NO: 3575 - DNA, 21 bp, Homo sapiens
ctgggttatctttgtgctata

SEQ ID NO: 3576 - DNA, 21 bp, Homo sapiens
accgtaaagcattaaagtaaa

SEQ ID NO: 3577 - DNA, 21 bp, Homo sapiens
aacggtggaaatgcacaacaa

SEQ ID NO: 3578 - DNA, 21 bp, Homo sapiens
cagatcgagagtgaccgatta

SEQ ID NO: 3579 - DNA, 21 bp, Homo sapiens
ccgtgtcgtatgacctagtaa

SEQ ID NO: 3580 - DNA, 21 bp, Homo sapiens
cacgatgtagtcaccttacta

SEQ ID NO: 3581 - DNA, 21 bp, Homo sapiens
accgggagacacagaagtaca

SEQ ID NO: 3582 - DNA, 21 bp, Homo sapiens
aagcgttgatggattaattaa

SEQ ID NO: 3583 - DNA, 21 bp, Homo sapiens
atggttatagcagaaatacaa

SEQ ID NO: 3584 - DNA, 21 bp, Homo sapiens
cagggctgactgagagcataa

SEQ ID NO: 3585 - DNA, 21 bp, Homo sapiens
ccggaggccttcgggcagcaa

SEQ ID NO: 3586 - DNA, 21 bp, Homo sapiens
atccatcacaggagtcagaaa

SEQ ID NO: 3587 - DNA, 21 bp, Homo sapiens
aaggatttcttggtccagttt

SEQ ID NO: 3588 - DNA, 21 bp, Homo sapiens
caagagaagcatgacaaacaa

SEQ ID NO: 3589 - DNA, 21 bp, Homo sapiens
caacctggaaatcatgacaaa

SEQ ID NO: 3590 - DNA, 21 bp, Homo sapiens
ctgaagaaacttctgctttaa

SEQ ID NO: 3591 - DNA, 21 bp, Homo sapiens
ataacttacttctgtattaaa

SEQ ID NO: 3592 - DNA, 21 bp, Homo sapiens
atgaggtttctttgacttcaa

SEQ ID NO: 3593 - DNA, 21 bp, Homo sapiens
aaggtttgagattcagaagta

SEQ ID NO: 3594 - DNA, 21 bp, Homo sapiens
cgccttaaatttgtaaataaa

SEQ ID NO: 3595 - DNA, 21 bp, Homo sapiens
cagccagcccttggcctccaa

SEQ ID NO: 3596 - DNA, 21 bp, Homo sapiens
ctggacaaggctaacatccca

SEQ ID NO: 3597 - DNA, 21 bp, Homo sapiens
cagcgaagtgccaacacctaa

SEQ ID NO: 3598 - DNA, 21 bp, Homo sapiens
caccacaactccaggaaggaa

SEQ ID NO: 3599 - DNA, 21 bp, Homo sapiens
caccaagttcaagcagctcta

SEQ ID NO: 3600 - DNA, 21 bp, Homo sapiens
cgggccagcaacaaagtgcaa

SEQ ID NO: 3601 - DNA, 21 bp, Homo sapiens
caggcagagggtgatagaaga

SEQ ID NO: 3602 - DNA, 21 bp, Homo sapiens
caggcaatggcctaaacttca

SEQ ID NO: 3603 - DNA, 21 bp, Homo sapiens
aagcactgacataaacgttaa

SEQ ID NO: 3604 - DNA, 21 bp, Homo sapiens
caccggatggattctgatgaa

SEQ ID NO: 3605 - DNA, 21 bp, Homo sapiens
accgataagcagcgagtgtaa

SEQ ID NO: 3606 - DNA, 21 bp, Homo sapiens
accctgtaatttattcgtgta

SEQ ID NO: 3607 - DNA, 21 bp, Homo sapiens
atggaagagatcaataccaaa

SEQ ID NO: 3608 - DNA, 21 bp, Homo sapiens
aaggaagaaccacaaactaaa

SEQ ID NO: 3609 - DNA, 21 bp, Homo sapiens
cgggaaatatgttgaatcttt

SEQ ID NO: 3610 - DNA, 21 bp, Homo sapiens
tgcaggctcaacataacataa

SEQ ID NO: 3611 - DNA, 21 bp, Homo sapiens
tgggactttattcatatgatt

SEQ ID NO: 3612 - DNA, 21 bp, Homo sapiens
caacataacataagctagaaa

SEQ ID NO: 3613 - DNA, 21 bp, Homo sapiens
aagcagttgaattatgttaaa

SEQ ID NO: 3614 - DNA, 21 bp, Homo sapiens
caggtatattgaaatctttaa

SEQ ID NO: 3615 - DNA, 21 bp, Homo sapiens
caggataatatatttgcagat

SEQ ID NO: 3616 - DNA, 21 bp, Homo sapiens
taggatgtctgtaataaataa

SEQ ID NO: 3617 - DNA, 21 bp, Homo sapiens
cacactgagttctatcagtta

SEQ ID NO: 3618 - DNA, 21 bp, Homo sapiens
cagctcctttattataatcaa

SEQ ID NO: 3619 - DNA, 21 bp, Homo sapiens
aagccatgtgctaagaataaa

SEQ ID NO: 3620 - DNA, 21 bp, Homo sapiens
ctggaccataatagacaccaa

SEQ ID NO: 3621 - DNA, 21 bp, Homo sapiens
cacgacaatgaagacctccta

SEQ ID NO: 3622 - DNA, 21 bp, Homo sapiens
ccgaaataaatgacacataca

SEQ ID NO: 3623 - DNA, 21 bp, Homo sapiens
gtgcatccttatatacctcaa

SEQ ID NO: 3624 - DNA, 21 bp, Homo sapiens
ccctatgagtatatatatata

SEQ ID NO: 3625 - DNA, 21 bp, Homo sapiens
ctccttcaccaccaacattaa

SEQ ID NO: 3626 - DNA, 21 bp, Homo sapiens
cagggtaactattattgcgca

SEQ ID NO: 3627 - DNA, 21 bp, Homo sapiens
tggagtgtacaccttaaacaa

SEQ ID NO: 3628 - DNA, 21 bp, Homo sapiens
aaggtgtctgttaatgagaga

SEQ ID NO: 3629 - DNA, 21 bp, Homo sapiens
caaacagaaggtgtctgttaa

SEQ ID NO: 3630 - DNA, 21 bp, Homo sapiens
ctgaccaagaccaatgcataa

SEQ ID NO: 3631 - DNA, 21 bp, Homo sapiens
aggaggtttgactaagatcaa

SEQ ID NO: 3632 - DNA, 21 bp, Homo sapiens
ccaggaatatgtggactataa

SEQ ID NO: 3633 - DNA, 21 bp, Homo sapiens
atccattgtggtggccaacta

SEQ ID NO: 3634 - DNA, 21 bp, Homo sapiens
ctggtggactacgacgagaaa

SEQ ID NO: 3635 - DNA, 21 bp, Homo sapiens
cagccggtttattgtgcttca

SEQ ID NO: 3636 - DNA, 21 bp, Homo sapiens
caagagcttcttagagtagta

SEQ ID NO: 3637 - DNA, 21 bp, Homo sapiens
caagactatgatacaactcca

SEQ ID NO: 3638 - DNA, 21 bp, Homo sapiens
ctggcagtgactaatcagtaa

SEQ ID NO: 3639 - DNA, 21 bp, Homo sapiens
gtggatcttccaggccataaa

SEQ ID NO: 3640 - DNA, 21 bp, Homo sapiens
cagccagggaatcattaacaa

SEQ ID NO: 3641 - DNA, 21 bp, Homo sapiens
tgggatgctctttaaataata

SEQ ID NO: 3642 - DNA, 21 bp, Homo sapiens
gggatgctctttaaataataa

SEQ ID NO: 3643 - DNA, 21 bp, Homo sapiens
ctgcattgctgagtcaatcaa

SEQ ID NO: 3644 - DNA, 21 bp, Homo sapiens
ctgaccaatacgattgcataa

SEQ ID NO: 3645 - DNA, 21 bp, Homo sapiens
aagcaagatttcagcctggaa

SEQ ID NO: 3646 - DNA, 21 bp, Homo sapiens
aaggtgcttgttaatgagaga

SEQ ID NO: 3647 - DNA, 21 bp, Homo sapiens
tcctattgacatcgccagtaa

SEQ ID NO: 3648 - DNA, 21 bp, Homo sapiens
cactattgagtgaaacattga

SEQ ID NO: 3649 - DNA, 21 bp, Homo sapiens
aacattgaactcatatctgta

SEQ ID NO: 3650 - DNA, 21 bp, Homo sapiens
atgggaggccatcacattgta

SEQ ID NO: 3651 - DNA, 21 bp, Homo sapiens
ctggtgctgataacagcggaa

SEQ ID NO: 3652 - DNA, 21 bp, Homo sapiens
aaagacgaagagcaagaataa

SEQ ID NO: 3653 - DNA, 21 bp, Homo sapiens
cacgacaccggataaaccaaa

SEQ ID NO: 3654 - DNA, 21 bp, Homo sapiens
accatgcactatatttgtata

SEQ ID NO: 3655 - DNA, 21 bp, Homo sapiens
aaccatggtcatgtgagttat

SEQ ID NO: 3656 - DNA, 21 bp, Homo sapiens
atcccagagcttcaaagtgta

SEQ ID NO: 3657 - DNA, 21 bp, Homo sapiens
ctggacgaaaccaacacatat

SEQ ID NO: 3658 - DNA, 21 bp, Homo sapiens
cagctgtgggtggctaattaa

SEQ ID NO: 3659 - DNA, 21 bp, Homo sapiens
aagggcgagaatggaccctga

SEQ ID NO: 3660 - DNA, 21 bp, Homo sapiens
cagagccgtttcgccaaggaa

SEQ ID NO: 3661 - DNA, 21 bp, Homo sapiens
ccgggtcattggcaagctgat

SEQ ID NO: 3662 - DNA, 21 bp, Homo sapiens
ccgactatccctgcacataaa

SEQ ID NO: 3663 - DNA, 21 bp, Homo sapiens
aaagagtttgctgagaagaaa

SEQ ID NO: 3664 - DNA, 21 bp, Homo sapiens
ttcgctctgtttctacatcta

SEQ ID NO: 3665 - DNA, 21 bp, Homo sapiens
atggacattgattgattccaa

SEQ ID NO: 3666 - DNA, 21 bp, Homo sapiens
caggtataaaggtgacatata

SEQ ID NO: 3667 - DNA, 21 bp, Homo sapiens
ccaggtaatttctaatgcaaa

SEQ ID NO: 3668 - DNA, 21 bp, Homo sapiens
cagactattataaagctttaa

SEQ ID NO: 3669 - DNA, 21 bp, Homo sapiens
aactgttacaatcaaggtcta

SEQ ID NO: 3670 - DNA, 21 bp, Homo sapiens
tgggataaggaaacacttcta

SEQ ID NO: 3671 - DNA, 21 bp, Homo sapiens
caagcccaatacagccattaa

SEQ ID NO: 3672 - DNA, 21 bp, Homo sapiens
tagggtgtgtgttcaccttca

SEQ ID NO: 3673 - DNA, 21 bp, Homo sapiens
aaccaagatggaagaattcaa

SEQ ID NO: 3674 - DNA, 21 bp, Homo sapiens
taggatgaattgatcattata

SEQ ID NO: 3675 - DNA, 21 bp, Homo sapiens
cagggtgatttggccgtcaaa

SEQ ID NO: 3676 - DNA, 21 bp, Homo sapiens
caggagcggctcagtcatgaa

SEQ ID NO: 3677 - DNA, 21 bp, Homo sapiens
accagccttcttcctagtcat

SEQ ID NO: 3678 - DNA, 21 bp, Homo sapiens
ctggagataaatcctgatgat

SEQ ID NO: 3679 - DNA, 21 bp, Homo sapiens
aagctcatgaaagaaatctta

SEQ ID NO: 3680 - DNA, 21 bp, Homo sapiens
caagaatgataaggcagttaa

SEQ ID NO: 3681 - DNA, 21 bp, Homo sapiens
aaggctgaggccgacaagaat

SEQ ID NO: 3682 - DNA, 21 bp, Homo sapiens
ccgcatctatcgcatgatcaa

SEQ ID NO: 3683 - DNA, 21 bp, Homo sapiens
tagggagtggcaggtgctcaa

SEQ ID NO: 3684 - DNA, 21 bp, Homo sapiens
caggagggtgggtgaattcca

SEQ ID NO: 3685 - DNA, 21 bp, Homo sapiens
cgggaagtgcaggcccgtcaa

SEQ ID NO: 3686 - DNA, 21 bp, Homo sapiens
cacccgagccatggatttcaa

SEQ ID NO: 3687 - DNA, 21 bp, Homo sapiens
acggtgggaagttgcgataca

SEQ ID NO: 3688 - DNA, 21 bp, Homo sapiens
acgcctggacgtggagttcaa

SEQ ID NO: 3689 - DNA, 21 bp, Homo sapiens
caccgtatccattgacgtcat

SEQ ID NO: 3690 - DNA, 21 bp, Homo sapiens
atccattgacgtcattgtcta

SEQ ID NO: 3691 - DNA, 21 bp, Homo sapiens
tacgtgtatattcggcatcaa

SEQ ID NO: 3692 - DNA, 21 bp, Homo sapiens
caagctgctattccacattta

SEQ ID NO: 3693 - DNA, 21 bp, Homo sapiens
tggatttaccagtgaacctaa

SEQ ID NO: 3694 - DNA, 21 bp, Homo sapiens
tacggctttcaacaagaacta

SEQ ID NO: 3695 - DNA, 21 bp, Homo sapiens
ctcggtcttcggagtgcttat

SEQ ID NO: 3696 - DNA, 21 bp, Homo sapiens
cctgatctatacggctttcaa

SEQ ID NO: 3697 - DNA, 21 bp, Homo sapiens
ctgcagcgcctccatcctcaa

SEQ ID NO: 3698 - DNA, 21 bp, Homo sapiens
cagggccgctgccgccgtcaa

SEQ ID NO: 3699 - DNA, 21 bp, Homo sapiens
cgccgtcaatttcttcaacat

SEQ ID NO: 3700 - DNA, 21 bp, Homo sapiens
caggaggctgcaagtctccta

SEQ ID NO: 3701 - DNA, 21 bp, Homo sapiens
tccagtcatcagctaatacaa

SEQ ID NO: 3702 - DNA, 21 bp, Homo sapiens
atggcactatgtagtaattaa

SEQ ID NO: 3703 - DNA, 21 bp, Homo sapiens
ctgaagtgaccgtatatatta

SEQ ID NO: 3704 - DNA, 21 bp, Homo sapiens
cggcgcgatgatggacgttaa

SEQ ID NO: 3705 - DNA, 21 bp, Homo sapiens
aaggaccttcaggtttctgaa

SEQ ID NO: 3706 - DNA, 21 bp, Homo sapiens
ctgggatgccctcaaactcaa

SEQ ID NO: 3707 - DNA, 21 bp, Homo sapiens
ccgaacgtaccagggacttaa

SEQ ID NO: 3708 - DNA, 21 bp, Homo sapiens
ccgggcatcagtcaccggtta

SEQ ID NO: 3709 - DNA, 21 bp, Homo sapiens
acagctaataatgaagttatt

SEQ ID NO: 3710 - DNA, 21 bp, Homo sapiens
ttagaggacaatgtaactcta

SEQ ID NO: 3711 - DNA, 21 bp, Homo sapiens
atgcagggtattgcgaaacaa

SEQ ID NO: 3712 - DNA, 21 bp, Homo sapiens
ctggtactaagaggctattta

SEQ ID NO: 3713 - DNA, 21 bp, Homo sapiens
tcccaatctggtgacgattta

SEQ ID NO: 3714 - DNA, 21 bp, Homo sapiens
aaggaaaggctgattacggaa

SEQ ID NO: 3715 - DNA, 21 bp, Homo sapiens
atggaacttggttaacaccaa

SEQ ID NO: 3716 - DNA, 21 bp, Homo sapiens
cccagacacttcataggatta

SEQ ID NO: 3717 - DNA, 21 bp, Homo sapiens
ctggttcaacatggaaatgat

SEQ ID NO: 3718 - DNA, 21 bp, Homo sapiens
acagagcaaagtcttcagaaa

SEQ ID NO: 3719 - DNA, 21 bp, Homo sapiens
atctatttatttaaatattta

SEQ ID NO: 3720 - DNA, 21 bp, Homo sapiens
aacctagaggccgaagttcaa

SEQ ID NO: 3721 - DNA, 21 bp, Homo sapiens
acaggaggactttgatgataa

SEQ ID NO: 3722 - DNA, 21 bp, Homo sapiens
atgcaggaggttggagtggaa

SEQ ID NO: 3723 - DNA, 21 bp, Homo sapiens
caggaggactttgatgataat

SEQ ID NO: 3724 - DNA, 21 bp, Homo sapiens
atccttctctttatcagcaaa

SEQ ID NO: 3725 - DNA, 21 bp, Homo sapiens
cagcagctgaatgacctggaa

SEQ ID NO: 3726 - DNA, 21 bp, Homo sapiens
atccttctcttcatcaagaaa

SEQ ID NO: 3727 - DNA, 21 bp, Homo sapiens
ctagacaaactctatactgaa

SEQ ID NO: 3728 - DNA, 21 bp, Homo sapiens
catcaagaaacttgcaagaaa

SEQ ID NO: 3729 - DNA, 21 bp, Homo sapiens
tccactgaactttaccagcaa

SEQ ID NO: 3730 - DNA, 21 bp, Homo sapiens
ctggttcatcatggaaatgat

SEQ ID NO: 3731 - DNA, 21 bp, Homo sapiens
cagcaactgaatgacctggaa

SEQ ID NO: 3732 - DNA, 21 bp, Homo sapiens
tagcctagtgatatttgcaaa

SEQ ID NO: 3733 - DNA, 21 bp, Homo sapiens
gtcgctttacattgtggttaa

SEQ ID NO: 3734 - DNA, 21 bp, Homo sapiens
ctggttcaacatggcaatgat

SEQ ID NO: 3735 - DNA, 21 bp, Homo sapiens
tccactgaactttaccagcaa

SEQ ID NO: 3736 - DNA, 21 bp, Homo sapiens
cagcaactgaatgacctggaa

SEQ ID NO: 3737 - DNA, 21 bp, Homo sapiens
aggcgagagctgcaaagttta

SEQ ID NO: 3738 - DNA, 21 bp, Homo sapiens
cacagtgatgagcaagcagta

SEQ ID NO: 3739 - DNA, 21 bp, Homo sapiens
caagttaattccaaacacgaa

SEQ ID NO: 3740 - DNA, 21 bp, Homo sapiens
aagcaccatagtgacactgaa

SEQ ID NO: 3741 - DNA, 21 bp, Homo sapiens
caggtagtaggcgacactgtt

SEQ ID NO: 3742 - DNA, 21 bp, Homo sapiens
cagagtggaaatcctaaggaa

SEQ ID NO: 3743 - DNA, 21 bp, Homo sapiens
caaggacaggatgaactttga

SEQ ID NO: 3744 - DNA, 21 bp, Homo sapiens
caggttacctccgaaactgaa

SEQ ID NO: 3745 - DNA, 21 bp, Homo sapiens
accaagtgcagtttaaataca

SEQ ID NO: 3746 - DNA, 21 bp, Homo sapiens
tcgggcatttaagcaacatat

SEQ ID NO: 3747 - DNA, 21 bp, Homo sapiens
aaggcttctcttaaacactaa

SEQ ID NO: 3748 - DNA, 21 bp, Homo sapiens
aggcttcccaatggatttcaa

SEQ ID NO: 3749 - DNA, 21 bp, Homo sapiens
agggcctgacttcctacataa

SEQ ID NO: 3750 - DNA, 21 bp, Homo sapiens
aaccatgtgtttcctattaaa

SEQ ID NO: 3751 - DNA, 21 bp, Homo sapiens
tagattgttgtcatcctctta

SEQ ID NO: 3752 - DNA, 21 bp, Homo sapiens
aagactcttatttcggcttta

SEQ ID NO: 3753 - DNA, 21 bp, Homo sapiens
cacaggtaggcaggccaacaa

SEQ ID NO: 3754 - DNA, 21 bp, Homo sapiens
acaggaaagattgagaagtaa

SEQ ID NO: 3755 - DNA, 21 bp, Homo sapiens
ccggagctgaattacctttca

SEQ ID NO: 3756 - DNA, 21 bp, Homo sapiens
atcaataatgttctatagaaa

SEQ ID NO: 3757 - DNA, 21 bp, Homo sapiens
ccagaaggaagtacatttgaa

SEQ ID NO: 3758 - DNA, 21 bp, Homo sapiens
acggtaatacgtgaaagcaaa

SEQ ID NO: 3759 - DNA, 21 bp, Homo sapiens
caccaacgtggcggtcatgaa

SEQ ID NO: 3760 - DNA, 21 bp, Homo sapiens
ccgactcttcctcaaggacaa

SEQ ID NO: 3761 - DNA, 21 bp, Homo sapiens
ccgcctggaggcattgcccaa

SEQ ID NO: 3762 - DNA, 21 bp, Homo sapiens
cagcttgaggtgctcacgcta

SEQ ID NO: 3763 - DNA, 21 bp, Homo sapiens
catacataacttgatatagaa

SEQ ID NO: 3764 - DNA, 21 bp, Homo sapiens
aaggaggacggttaacttgta

SEQ ID NO: 3765 - DNA, 21 bp, Homo sapiens
tacatgtgtagggaaagttaa

SEQ ID NO: 3766 - DNA, 21 bp, Homo sapiens
tacactggatatgttgttaaa

SEQ ID NO: 3767 - DNA, 21 bp, Homo sapiens
tcccttctacaggctgttcaa

SEQ ID NO: 3768 - DNA, 21 bp, Homo sapiens
aaggtatttcgaaactgccaa

SEQ ID NO: 3769 - DNA, 21 bp, Homo sapiens
agggcacacctagacaaacaa

SEQ ID NO: 3770 - DNA, 21 bp, Homo sapiens
aggcagctatctgcactctaa

SEQ ID NO: 3771 - DNA, 21 bp, Homo sapiens
caggagaacatctctctgaaa

SEQ ID NO: 3772 - DNA, 21 bp, Homo sapiens
cagagggatataaattattta

SEQ ID NO: 3773 - DNA, 21 bp, Homo sapiens
aagaagtgaagtcaagatgaa

SEQ ID NO: 3774 - DNA, 21 bp, Homo sapiens
cagagcaatatctgtgatgaa

SEQ ID NO: 3775 - DNA, 21 bp, Homo sapiens
ctggaggagctcactggagaa

SEQ ID NO: 3776 - DNA, 21 bp, Homo sapiens
aagcaagttcctgctgctgaa

SEQ ID NO: 3777 - DNA, 21 bp, Homo sapiens
ctgggtgtattacgagtcaaa

SEQ ID NO: 3778 - DNA, 21 bp, Homo sapiens
cggctttgactgggtgtatta

SEQ ID NO: 3779 - DNA, 21 bp, Homo sapiens
ccgcctgaactcgctggctat

SEQ ID NO: 3780 - DNA, 21 bp, Homo sapiens
ctgggtgtattacgagtcaaa

SEQ ID NO: 3781 - DNA, 21 bp, Homo sapiens
aacccgtaacaagaagcttaa

SEQ ID NO: 3782 - DNA, 21 bp, Homo sapiens
cagcgagtatatgaacaacaa

SEQ ID NO: 3783 - DNA, 21 bp, Homo sapiens
gaggaggtggattatagcaaa

SEQ ID NO: 3784 - DNA, 21 bp, Homo sapiens
caggcgcttcaaggaaaccaa

SEQ ID NO: 3785 - DNA, 21 bp, Homo sapiens
tagggagctattcatgtttca

SEQ ID NO: 3786 - DNA, 21 bp, Homo sapiens
caggacactgtgagggaacaa

SEQ ID NO: 3787 - DNA, 21 bp, Homo sapiens
cagaccgacattgtggactta

SEQ ID NO: 3788 - DNA, 21 bp, Homo sapiens
cacactggaggtcctccatta

SEQ ID NO: 3789 - DNA, 21 bp, Homo sapiens
tcgagttgaatgaacatagaa

SEQ ID NO: 3790 - DNA, 21 bp, Homo sapiens
ctgaggtgatttatgccttaa

SEQ ID NO: 3791 - DNA, 21 bp, Homo sapiens
aaggcaaagcacgaaatgtta

SEQ ID NO: 3792 - DNA, 21 bp, Homo sapiens
cacgcctacttaagacaatta

SEQ ID NO: 3793 - DNA, 21 bp, Homo sapiens
aaggaataaattgctccttga

SEQ ID NO: 3794 - DNA, 21 bp, Homo sapiens
cagcgaatgaatgctgtatat

SEQ ID NO: 3795 - DNA, 21 bp, Homo sapiens
ctggatacttgcaaggaccaa

SEQ ID NO: 3796 - DNA, 21 bp, Homo sapiens
ccaaatgtcaatttagaagaa

SEQ ID NO: 3797 - DNA, 21 bp, Homo sapiens
cccgttcacgttgcctaataa

SEQ ID NO: 3798 - DNA, 21 bp, Homo sapiens
ctccaccctatatgtagtata

SEQ ID NO: 3799 - DNA, 21 bp, Homo sapiens
cagagaatcatacttagcaaa

SEQ ID NO: 3800 - DNA, 21 bp, Homo sapiens
ccaccctatatgtagtataaa

SEQ ID NO: 3801 - DNA, 21 bp, Homo sapiens
ccagttcacatgcttctacaa

SEQ ID NO: 3802 - DNA, 21 bp, Homo sapiens
atggctgaagaaggtcctgaa

SEQ ID NO: 3803 - DNA, 21 bp, Homo sapiens
tggcttcatcatcttagtgta

SEQ ID NO: 3804 - DNA, 21 bp, Homo sapiens
cccggatgccttggagataga

SEQ ID NO: 3805 - DNA, 21 bp, Homo sapiens
cacgacaattctgacgcccaa

SEQ ID NO: 3806 - DNA, 21 bp, Homo sapiens
ctgaacaatcagtggattata

SEQ ID NO: 3807 - DNA, 21 bp, Homo sapiens
aagaactcggataatgataaa

SEQ ID NO: 3808 - DNA, 21 bp, Homo sapiens
ctagaggatcttgttactgaa

SEQ ID NO: 3809 - DNA, 21 bp, Homo sapiens
cccggcagatttcagaatcta

SEQ ID NO: 3810 - DNA, 21 bp, Homo sapiens
ccgcctcgtggctataataat

SEQ ID NO: 3811 - DNA, 21 bp, Homo sapiens
cagaatctataacgtgaccta

SEQ ID NO: 3812 - DNA, 21 bp, Homo sapiens
cacatacatgagggtctctta

SEQ ID NO: 3813 - DNA, 21 bp, Homo sapiens
ccggtgcttcagttagatcaa

SEQ ID NO: 3814 - DNA, 21 bp, Homo sapiens
caggcagatgttcctaataaa

SEQ ID NO: 3815 - DNA, 21 bp, Homo sapiens
tccgccaggcttaccatccaa

SEQ ID NO: 3816 - DNA, 21 bp, Homo sapiens
cccgttgaacgtcacatcttt

SEQ ID NO: 3817 - DNA, 21 bp, Homo sapiens
gaggcaagatatgaagatgaa

SEQ ID NO: 3818 - DNA, 21 bp, Homo sapiens
taccaccatgcaaacaagata

SEQ ID NO: 3819 - DNA, 21 bp, Homo sapiens
atcctatttattaaatttaaa

SEQ ID NO: 3820 - DNA, 21 bp, Homo sapiens
atcagttgaagtactaaagaa

SEQ ID NO: 3821 - DNA, 21 bp, Homo sapiens
ccagagatagttgggtgacaa

SEQ ID NO: 3822 - DNA, 21 bp, Homo sapiens
aaggacaagggccaaggtcta

SEQ ID NO: 3823 - DNA, 21 bp, Homo sapiens
cagagatagttgggtgacaaa

SEQ ID NO: 3824 - DNA, 21 bp, Homo sapiens
cagctatgagctggccttcaa

SEQ ID NO: 3825 - DNA, 21 bp, Homo sapiens
cagcatggtatggagcatcaa

SEQ ID NO: 3826 - DNA, 21 bp, Homo sapiens
aacaagttgtttcattgacta

SEQ ID NO: 3827 - DNA, 21 bp, Homo sapiens
cagctctcagccaacgagtaa

SEQ ID NO: 3828 - DNA, 21 bp, Homo sapiens
ttcattgactatcaaactgaa

SEQ ID NO: 3829 - DNA, 21 bp, Homo sapiens
ccaaataatggtcaaggataa

SEQ ID NO: 3830 - DNA, 21 bp, Homo sapiens
ctcagtgatggagataattta

SEQ ID NO: 3831 - DNA, 21 bp, Homo sapiens
accatgtttgtggctattaaa

SEQ ID NO: 3832 - DNA, 21 bp, Homo sapiens
aaccatgtttgtggctattaa

SEQ ID NO: 3833 - DNA, 21 bp, Homo sapiens
cagacagcctttggccctaaa

SEQ ID NO: 3834 - DNA, 21 bp, Homo sapiens
ctccatagaagtgtcattcca

SEQ ID NO: 3835 - DNA, 21 bp, Homo sapiens
ttgaaatgttgtgaaatgtta

SEQ ID NO: 3836 - DNA, 21 bp, Homo sapiens
caggccctttgtaccacatat

SEQ ID NO: 3837 - DNA, 21 bp, Homo sapiens
caagctgcacgtggccgttaa

SEQ ID NO: 3838 - DNA, 21 bp, Homo sapiens
ctggtttagctagagagtgaa

SEQ ID NO: 3839 - DNA, 21 bp, Homo sapiens
caagagttgaagtattgataa

SEQ ID NO: 3840 - DNA, 21 bp, Homo sapiens
aacgatttcaccacatctgaa

SEQ ID NO: 3841 - DNA, 21 bp, Homo sapiens
ccagatttggtgactcatcaa

SEQ ID NO: 3842 - DNA, 21 bp, Homo sapiens
tagaaagttaactgtttggaa

SEQ ID NO: 3843 - DNA, 21 bp, Homo sapiens
ccggaagagacgagtgcggta

SEQ ID NO: 3844 - DNA, 21 bp, Homo sapiens
acgaagagtaattgctgcaaa

SEQ ID NO: 3845 - DNA, 21 bp, Homo sapiens
cccaggattcatagacttcat

SEQ ID NO: 3846 - DNA, 21 bp, Homo sapiens
cagcagcagccagaaacgata

SEQ ID NO: 3847 - DNA, 21 bp, Homo sapiens
ccgcaccgacctgaagaagaa

SEQ ID NO: 3848 - DNA, 21 bp, Homo sapiens
atggcctgcactcttacgaaa

SEQ ID NO: 3849 - DNA, 21 bp, Homo sapiens
ctccaagttcaaggaaccaaa

SEQ ID NO: 3850 - DNA, 21 bp, Homo sapiens
ccgtagaatatgaagaattta

SEQ ID NO: 3851 - DNA, 21 bp, Homo sapiens
aagggcgaagttgtactatat

SEQ ID NO: 3852 - DNA, 21 bp, Homo sapiens
tcggatctttctggatcgcat

SEQ ID NO: 3853 - DNA, 21 bp, Homo sapiens
cggatggaggttactctttca

SEQ ID NO: 3854 - DNA, 21 bp, Homo sapiens
aaggcagagttgggaaataga

SEQ ID NO: 3855 - DNA, 21 bp, Homo sapiens
caagtatgagacagtgcccaa

SEQ ID NO: 3856 - DNA, 21 bp, Homo sapiens
cagcactgtgcttgtatctaa

SEQ ID NO: 3857 - DNA, 21 bp, Homo sapiens
caggaagacgctgcacttcga

SEQ ID NO: 3858 - DNA, 21 bp, Homo sapiens
aaggaagatgtggaaatctta

SEQ ID NO: 3859 - DNA, 21 bp, Homo sapiens
acccatgtccatgttgtacta

SEQ ID NO: 3860 - DNA, 21 bp, Homo sapiens
ctgcagtagtgtggactagaa

SEQ ID NO: 3861 - DNA, 21 bp, Homo sapiens
cagcctgtggctttacctgaa

SEQ ID NO: 3862 - DNA, 21 bp, Homo sapiens
ccacgtgaactatgcaattta

SEQ ID NO: 3863 - DNA, 21 bp, Homo sapiens
caggtggaacatggtggagaa

SEQ ID NO: 3864 - DNA, 21 bp, Homo sapiens
cacgtgaactatgcaatttaa

SEQ ID NO: 3865 - DNA, 21 bp, Homo sapiens
ttagtttgcagttacactaaa

SEQ ID NO: 3866 - DNA, 21 bp, Homo sapiens
caggaaggtagaaatatctga

SEQ ID NO: 3867 - DNA, 21 bp, Homo sapiens
tgcatcagcattagtaatcaa

SEQ ID NO: 3868 - DNA, 21 bp, Homo sapiens
ctgactctaagtggcattcaa

SEQ ID NO: 3869 - DNA, 21 bp, Homo sapiens
tcggaattgcgtttacactta

SEQ ID NO: 3870 - DNA, 21 bp, Homo sapiens
cccgggactgttgacagccaa

SEQ ID NO: 3871 - DNA, 21 bp, Homo sapiens
tcccatcaacatggtgtccaa

SEQ ID NO: 3872 - DNA, 21 bp, Homo sapiens
caggtgctatgccacattgaa

SEQ ID NO: 3873 - DNA, 21 bp, Homo sapiens
agcagcaagtctctaaagaaa

SEQ ID NO: 3874 - DNA, 21 bp, Homo sapiens
ctgagccaactccttagagaa

SEQ ID NO: 3875 - DNA, 21 bp, Homo sapiens
taggtacgacatcagaattca

SEQ ID NO: 3876 - DNA, 21 bp, Homo sapiens
atccattctgttgtgaagtaa

SEQ ID NO: 3877 - DNA, 21 bp, Homo sapiens
tcgaacgatgttggactcata

SEQ ID NO: 3878 - DNA, 21 bp, Homo sapiens
taggaagacgtttgaggatta

SEQ ID NO: 3879 - DNA, 21 bp, Homo sapiens
caacgggagtctgatcatcaa

SEQ ID NO: 3880 - DNA, 21 bp, Homo sapiens
accgctttacgcttcttcaaa

SEQ ID NO: 3881 - DNA, 21 bp, Homo sapiens
caggagtcttacacatataaa

SEQ ID NO: 3882 - DNA, 21 bp, Homo sapiens
aaggaattattacaaggtaaa

SEQ ID NO: 3883 - DNA, 21 bp, Homo sapiens
gagaatatgtgttgttattta

SEQ ID NO: 3884 - DNA, 21 bp, Homo sapiens
ccggtttacctgaaggactta

SEQ ID NO: 3885 - DNA, 21 bp, Homo sapiens
ccagatcatcctgaactggaa

SEQ ID NO: 3886 - DNA, 21 bp, Homo sapiens
cagcaacgtcaagagctctaa

SEQ ID NO: 3887 - DNA, 21 bp, Homo sapiens
ccctatcagaacggccttcta

SEQ ID NO: 3888 - DNA, 21 bp, Homo sapiens
acggtgaacatcatagttgta

SEQ ID NO: 3889 - DNA, 21 bp, Homo sapiens
cggtcctgacttcaactataa

SEQ ID NO: 3890 - DNA, 21 bp, Homo sapiens
caccttatcttaaagcactta

SEQ ID NO: 3891 - DNA, 21 bp, Homo sapiens
cggagataacaccatcttcaa

SEQ ID NO: 3892 - DNA, 21 bp, Homo sapiens
ccgcatggtggagcaattcaa

SEQ ID NO: 3893 - DNA, 21 bp, Homo sapiens
ccgcctttgcctgaccagcaa

SEQ ID NO: 3894 - DNA, 21 bp, Homo sapiens
ccggtatcgtttcgcatggaa

SEQ ID NO: 3895 - DNA, 21 bp, Homo sapiens
acaataggccatgttaattaa

SEQ ID NO: 3896 - DNA, 21 bp, Homo sapiens
ccgggtgaacctcagtcctaa

SEQ ID NO: 3897 - DNA, 21 bp, Homo sapiens
tacggtggtctttgaattata

SEQ ID NO: 3898 - DNA, 21 bp, Homo sapiens
ccggcttaaattggactccta

SEQ ID NO: 3899 - DNA, 21 bp, Homo sapiens
ccctcgaaacacaacctttaa

SEQ ID NO: 3900 - DNA, 21 bp, Homo sapiens
ctgcatgtcgccaccactgaa

SEQ ID NO: 3901 - DNA, 21 bp, Homo sapiens
ccctagattcactaagacaaa

SEQ ID NO: 3902 - DNA, 21 bp, Homo sapiens
actgaggacattggaaatgaa

SEQ ID NO: 3903 - DNA, 21 bp, Homo sapiens
tcggagcaattcaatatgcaa

SEQ ID NO: 3904 - DNA, 21 bp, Homo sapiens
tcgctagtattccaacagaaa

SEQ ID NO: 3905 - DNA, 21 bp, Homo sapiens
ccggttgatgggacagaagta

SEQ ID NO: 3906 - DNA, 21 bp, Homo sapiens
cccgagcacatcatttatata

SEQ ID NO: 3907 - DNA, 21 bp, Homo sapiens
cagctacatgattcagcgcaa

SEQ ID NO: 3908 - DNA, 21 bp, Homo sapiens
ctggattgactttgctgtcaa

SEQ ID NO: 3909 - DNA, 21 bp, Homo sapiens
ctcgcttagcatggtaaatca

SEQ ID NO: 3910 - DNA, 21 bp, Homo sapiens
caccatcaacatggagaacaa

SEQ ID NO: 3911 - DNA, 21 bp, Homo sapiens
gaccagggagctgatatgcaa

SEQ ID NO: 3912 - DNA, 21 bp, Homo sapiens
cacagtgaagtcctccataaa

SEQ ID NO: 3913 - DNA, 21 bp, Homo sapiens
ccctttgatggtgatgggaaa

SEQ ID NO: 3914 - DNA, 21 bp, Homo sapiens
cccagtgatggtatacttgga

SEQ ID NO: 3915 - DNA, 21 bp, Homo sapiens
acaggtcactgtctacatcaa

SEQ ID NO: 3916 - DNA, 21 bp, Homo sapiens
cacatgctaatgtgtgctaaa

SEQ ID NO: 3917 - DNA, 21 bp, Homo sapiens
ccgaaggtacaaagaaattat

SEQ ID NO: 3918 - DNA, 21 bp, Homo sapiens
accgaagatcaggcaccttaa

SEQ ID NO: 3919 - DNA, 21 bp, Homo sapiens
aacgtgtgaccagaacaccta

SEQ ID NO: 3920 - DNA, 21 bp, Homo sapiens
ccctgtttaatgattgacgta

SEQ ID NO: 3921 - DNA, 21 bp, Homo sapiens
ctcggttgaattgcacgccaa

SEQ ID NO: 3922 - DNA, 21 bp, Homo sapiens
cagggcgtgggacatctagta

SEQ ID NO: 3923 - DNA, 21 bp, Homo sapiens
cgcaatgaccttccaagagaa

SEQ ID NO: 3924 - DNA, 21 bp, Homo sapiens
ctcgtttgactggtacatcaa

SEQ ID NO: 3925 - DNA, 21 bp, Homo sapiens
tcgggtcatgcagcatcaata

SEQ ID NO: 3926 - DNA, 21 bp, Homo sapiens
tcagacatcggttcatattaa

SEQ ID NO: 3927 - DNA, 21 bp, Homo sapiens
agcaactttattatagattta

SEQ ID NO: 3928 - DNA, 21 bp, Homo sapiens
cacatacatgataccatccaa

SEQ ID NO: 3929 - DNA, 21 bp, Homo sapiens
tagcatgatgttacaggaata

SEQ ID NO: 3930 - DNA, 21 bp, Homo sapiens
atgtagtagtttgatgaataa

SEQ ID NO: 3931 - DNA, 21 bp, Homo sapiens
ctgcgagtgtgataatttcaa

SEQ ID NO: 3932 - DNA, 21 bp, Homo sapiens
acagatgaagttaacagtgaa

SEQ ID NO: 3933 - DNA, 21 bp, Homo sapiens
tacgtattcagtgaatgggaa

SEQ ID NO: 3934 - DNA, 21 bp, Homo sapiens
aagagggataatacaaatgaa

SEQ ID NO: 3935 - DNA, 21 bp, Homo sapiens
caagctgaacctaatagccat

SEQ ID NO: 3936 - DNA, 21 bp, Homo sapiens
ccgcttcaatgaggaagtgaa

SEQ ID NO: 3937 - DNA, 21 bp, Homo sapiens
ctctcctgatgtagcacttaa

SEQ ID NO: 3938 - DNA, 21 bp, Homo sapiens
cacgtgtggcctgttcttcta

SEQ ID NO: 3939 - DNA, 21 bp, Homo sapiens
ccgagcttcgttcgagaacaa

SEQ ID NO: 3940 - DNA, 21 bp, Homo sapiens
aagctactgtgtcttcagcaa

SEQ ID NO: 3941 - DNA, 21 bp, Homo sapiens
cagggagacagaagaaattct

SEQ ID NO: 3942 - DNA, 21 bp, Homo sapiens
ctggatctatcattactgcaa

SEQ ID NO: 3943 - DNA, 21 bp, Homo sapiens
ctcggtgtgatctgagggcaa

SEQ ID NO: 3944 - DNA, 21 bp, Homo sapiens
ccgctatgaaatggcttcaaa

SEQ ID NO: 3945 - DNA, 21 bp, Homo sapiens
atgggtggacaccatcgtgaa

SEQ ID NO: 3946 - DNA, 21 bp, Homo sapiens
caagattgtttgggattggaa

SEQ ID NO: 3947 - DNA, 21 bp, Homo sapiens
cacatctatggtagtcaccaa

SEQ ID NO: 3948 - DNA, 21 bp, Homo sapiens
atggatcgaagtgaccttcaa

SEQ ID NO: 3949 - DNA, 21 bp, Homo sapiens
caggaggcagttcgccaggta

SEQ ID NO: 3950 - DNA, 21 bp, Homo sapiens
gaggaggtcgttcagattcta

SEQ ID NO: 3951 - DNA, 21 bp, Homo sapiens
ctggatgagacttgtttccaa

SEQ ID NO: 3952 - DNA, 21 bp, Homo sapiens
ctggagaagttaaagcctgaa

SEQ ID NO: 3953 - DNA, 21 bp, Homo sapiens
ctcctgcagcaccgacttcaa

SEQ ID NO: 3954 - DNA, 21 bp, Homo sapiens
cccagcgttcccagagccaaa

SEQ ID NO: 3955 - DNA, 21 bp, Homo sapiens
ccggtctaacgtctcacacca

SEQ ID NO: 3956 - DNA, 21 bp, Homo sapiens
caccagcgggctgatcctgaa

SEQ ID NO: 3957 - DNA, 21 bp, Homo sapiens
caggtgttcctgcgaactaca

SEQ ID NO: 3958 - DNA, 21 bp, Homo sapiens
ccgcagcatgccgctgatcta

SEQ ID NO: 3959 - DNA, 21 bp, Homo sapiens
aagccggtgaagcgcattcaa

SEQ ID NO: 3960 - DNA, 21 bp, Homo sapiens
tcagtttaccttaatgcctta

SEQ ID NO: 3961 - DNA, 21 bp, Homo sapiens
ccagaggttgtgcactgttta

SEQ ID NO: 3962 - DNA, 21 bp, Homo sapiens
ctacgtttctttaaccttgta

SEQ ID NO: 3963 - DNA, 21 bp, Homo sapiens
cactctgtatatttgattgaa

SEQ ID NO: 3964 - DNA, 21 bp, Homo sapiens
ctgcgtcgtcaccaaatcgta

SEQ ID NO: 3965 - DNA, 21 bp, Homo sapiens
ttcgttaacattgaccaagaa

SEQ ID NO: 3966 - DNA, 21 bp, Homo sapiens
cgcgcgcgagtcgacaagtaa

SEQ ID NO: 3967 - DNA, 21 bp, Homo sapiens
ctgcccagtgttgtttgtaaa

SEQ ID NO: 3968 - DNA, 21 bp, Homo sapiens
aagaagtgtccgagaactaaa

SEQ ID NO: 3969 - DNA, 21 bp, Homo sapiens
atgcatgtctatataattata

SEQ ID NO: 3970 - DNA, 21 bp, Homo sapiens
aagcgtaaatctaatcaataa

SEQ ID NO: 3971 - DNA, 21 bp, Homo sapiens
accagggaacccatttctcta

SEQ ID NO: 3972 - DNA, 21 bp, Homo sapiens
cagagggataacccaaacaaa

SEQ ID NO: 3973 - DNA, 21 bp, Homo sapiens
cgcagagtatttgaagtcaca

SEQ ID NO: 3974 - DNA, 21 bp, Homo sapiens
aggaatacttctgataattta

SEQ ID NO: 3975 - DNA, 21 bp, Homo sapiens
tacaatgaccacggtaggtta

SEQ ID NO: 3976 - DNA, 21 bp, Homo sapiens
ctggtgttcggtctacattta

SEQ ID NO: 3977 - DNA, 21 bp, Homo sapiens
caggaccaaatacctggacta

SEQ ID NO: 3978 - DNA, 21 bp, Homo sapiens
ctcgatcttgccataacttta

SEQ ID NO: 3979 - DNA, 21 bp, Homo sapiens
ctagttattagtttatgcaaa

SEQ ID NO: 3980 - DNA, 21 bp, Homo sapiens
caccgggagactgagaatgaa

SEQ ID NO: 3981 - DNA, 21 bp, Homo sapiens
ccgggaggatagggagctaaa

SEQ ID NO: 3982 - DNA, 21 bp, Homo sapiens
cagcacagactctcttaataa

SEQ ID NO: 3983 - DNA, 21 bp, Homo sapiens
ccggagcattgagatgatgga

SEQ ID NO: 3984 - DNA, 21 bp, Homo sapiens
tcggtatttcatagtacctga

SEQ ID NO: 3985 - DNA, 21 bp, Homo sapiens
aaccacttgtctcctaacaaa

SEQ ID NO: 3986 - DNA, 21 bp, Homo sapiens
cacgctttctttacatcacta

SEQ ID NO: 3987 - DNA, 21 bp, Homo sapiens
gcccaggatgatcctgtctaa

SEQ ID NO: 3988 - DNA, 21 bp, Homo sapiens
aagagaaggacaaggcctatg

SEQ ID NO: 3989 - DNA, 21 bp, Homo sapiens
aaccatctggccatagaacaa

SEQ ID NO: 3990 - DNA, 21 bp, Homo sapiens
aactgggattcttcggcttct

SEQ ID NO: 3991 - DNA, 21 bp, Homo sapiens
atcagcgatgtgaaacgtgaa

SEQ ID NO: 3992 - DNA, 21 bp, Homo sapiens
ctgagatactcaggatattaa

SEQ ID NO: 3993 - DNA, 21 bp, Homo sapiens
tacagccatcttggtccctta

SEQ ID NO: 3994 - DNA, 21 bp, Homo sapiens
tcggcggtccaatgatactaa

SEQ ID NO: 3995 - DNA, 21 bp, Homo sapiens
cagggtgttgacagaaagtat

SEQ ID NO: 3996 - DNA, 21 bp, Homo sapiens
ctcccatagtatccaagacaa

SEQ ID NO: 3997 - DNA, 21 bp, Homo sapiens
cagtctatacttggagttata

SEQ ID NO: 3998 - DNA, 21 bp, Homo sapiens
tacgtttagacagaggctaaa

SEQ ID NO: 3999 - DNA, 21 bp, Homo sapiens
caggagccgctttgtgaagaa

SEQ ID NO: 4000 - DNA, 21 bp, Homo sapiens
cgagatggtgatgtactctta

SEQ ID NO: 4001 - DNA, 21 bp, Homo sapiens
agggtcaatgagagccataaa

SEQ ID NO: 4002 - DNA, 21 bp, Homo sapiens
caactctcttatggtattata

SEQ ID NO: 4003 - DNA, 21 bp, Homo sapiens
accagccataactaacagcaa

SEQ ID NO: 4004 - DNA, 21 bp, Homo sapiens
aaggctactggcattaattat

SEQ ID NO: 4005 - DNA, 21 bp, Homo sapiens
atggactagatgatattacta

SEQ ID NO: 4006 - DNA, 21 bp, Homo sapiens
ctgtgtgaagttacacaatta

SEQ ID NO: 4007 - DNA, 21 bp, Homo sapiens
caggacgatgttggccagaaa

SEQ ID NO: 4008 - DNA, 21 bp, Homo sapiens
aaggtgcaatttatgactcca

SEQ ID NO: 4009 - DNA, 21 bp, Homo sapiens
gaggtggttcctattcaccaa

SEQ ID NO: 4010 - DNA, 21 bp, Homo sapiens
ccagatcgctgtgttactaat

SEQ ID NO: 4011 - DNA, 21 bp, Homo sapiens
tgggaagatggtagcagataa

SEQ ID NO: 4012 - DNA, 21 bp, Homo sapiens
agggataattcaaactgacaa

SEQ ID NO: 4013 - DNA, 21 bp, Homo sapiens
gtgaatgaccttagtccgcaa

SEQ ID NO: 4014 - DNA, 21 bp, Homo sapiens
caggcccgacagagagatgaa

SEQ ID NO: 4015 - DNA, 21 bp, Homo sapiens
aacctacaaactagacttgta

SEQ ID NO: 4016 - DNA, 21 bp, Homo sapiens
atcgccttacttgccatacaa

SEQ ID NO: 4017 - DNA, 21 bp, Homo sapiens
caaactagacttgtagattaa

SEQ ID NO: 4018 - DNA, 21 bp, Homo sapiens
cacatggatggcaaacctaat

SEQ ID NO: 4019 - DNA, 21 bp, Homo sapiens
cgcggtcgcttcgtcaagaaa

SEQ ID NO: 4020 - DNA, 21 bp, Homo sapiens
ctggattcacctaagattcaa

SEQ ID NO: 4021 - DNA, 21 bp, Homo sapiens
cagggtgagaagccaatggta

SEQ ID NO: 4022 - DNA, 21 bp, Homo sapiens
aagactgaagtgacagattaa

SEQ ID NO: 4023 - DNA, 21 bp, Homo sapiens
cagactggcactttatctcaa

SEQ ID NO: 4024 - DNA, 21 bp, Homo sapiens
ccggtaactattgtccatgaa

SEQ ID NO: 4025 - DNA, 21 bp, Homo sapiens
cagcagctatcatattatcaa

SEQ ID NO: 4026 - DNA, 21 bp, Homo sapiens
aagcttaatattagagaccca

SEQ ID NO: 4027 - DNA, 21 bp, Homo sapiens
cacgaccattaatgttatgaa

SEQ ID NO: 4028 - DNA, 21 bp, Homo sapiens
tcgcatcatctcaacaatcat

SEQ ID NO: 4029 - DNA, 21 bp, Homo sapiens
agggattataccgttaggaaa

SEQ ID NO: 4030 - DNA, 21 bp, Homo sapiens
agcctagatatggaccattta

SEQ ID NO: 4031 - DNA, 21 bp, Homo sapiens
accgagagagccgtatattaa

SEQ ID NO: 4032 - DNA, 21 bp, Homo sapiens
acgggatgttacgtcaaccat

SEQ ID NO: 4033 - DNA, 21 bp, Homo sapiens
aaccatcttaagatccaagaa

SEQ ID NO: 4034 - DNA, 21 bp, Homo sapiens
taggcagagcaagtttattta

SEQ ID NO: 4035 - DNA, 21 bp, Homo sapiens
cagggagacgtggctcatcta

SEQ ID NO: 4036 - DNA, 21 bp, Homo sapiens
accgtcatgtacgaccttgta

SEQ ID NO: 4037 - DNA, 21 bp, Homo sapiens
cacgcttaccgacctagccaa

SEQ ID NO: 4038 - DNA, 21 bp, Homo sapiens
ccggcctagcctagaatccta

SEQ ID NO: 4039 - DNA, 21 bp, Homo sapiens
cagccagggcgtgtggtttaa

SEQ ID NO: 4040 - DNA, 21 bp, Homo sapiens
cccgccctcctgagctatgaa

SEQ ID NO: 4041 - DNA, 21 bp, Homo sapiens
aacggtcaccgtgcccatgta

SEQ ID NO: 4042 - DNA, 21 bp, Homo sapiens
cccattgacacaaaccctcaa

SEQ ID NO: 4043 - DNA, 21 bp, Homo sapiens
cccataaagttaaatccctta

SEQ ID NO: 4044 - DNA, 21 bp, Homo sapiens
caccaagtgaactcagtttaa

SEQ ID NO: 4045 - DNA, 21 bp, Homo sapiens
caccttatggttatggtgtaa

SEQ ID NO: 4046 - DNA, 21 bp, Homo sapiens
agggactattatgcccataaa

SEQ ID NO: 4047 - DNA, 21 bp, Homo sapiens
ctggtaaatggacttccttaa

SEQ ID NO: 4048 - DNA, 21 bp, Homo sapiens
cccgacaagaatacaacgata

SEQ ID NO: 4049 - DNA, 21 bp, Homo sapiens
acccgaagtgctgccatgaaa

SEQ ID NO: 4050 - DNA, 21 bp, Homo sapiens
cagcacagaaatatcgaccaa

SEQ ID NO: 4051 - DNA, 21 bp, Homo sapiens
aagaaccaagattgttctaaa

SEQ ID NO: 4052 - DNA, 21 bp, Homo sapiens
cagcaagcaaatcaacccgaa

SEQ ID NO: 4053 - DNA, 21 bp, Homo sapiens
ccaaaccagattgatgactta

SEQ ID NO: 4054 - DNA, 21 bp, Homo sapiens
accatataacatgtgattata

SEQ ID NO: 4055 - DNA, 21 bp, Homo sapiens
atcataggtctatatgagaaa

SEQ ID NO: 4056 - DNA, 21 bp, Homo sapiens
aacagcgaggattctgatgaa

SEQ ID NO: 4057 - DNA, 21 bp, Homo sapiens
cacgttctgattgggacctca

SEQ ID NO: 4058 - DNA, 21 bp, Homo sapiens
caccatgtcgctcatggtcat

SEQ ID NO: 4059 - DNA, 21 bp, Homo sapiens
agcgaggattctgatgaacaa

SEQ ID NO: 4060 - DNA, 21 bp, Homo sapiens
cagctccatctatccagggaa

SEQ ID NO: 4061 - DNA, 21 bp, Homo sapiens
aacagggaggattctgatgaa

SEQ ID NO: 4062 - DNA, 21 bp, Homo sapiens
tacctgcggctggaatctgaa

SEQ ID NO: 4063 - DNA, 21 bp, Homo sapiens
caggactgaggcaagcctcaa

SEQ ID NO: 4064 - DNA, 21 bp, Homo sapiens
ccaggtggtctcgtcacctca

SEQ ID NO: 4065 - DNA, 21 bp, Homo sapiens
aagaaatgttgcgtaactcaa

SEQ ID NO: 4066 - DNA, 21 bp, Homo sapiens
caccctctggacattcaccca

SEQ ID NO: 4067 - DNA, 21 bp, Homo sapiens
cagcatataattctccctgca

SEQ ID NO: 4068 - DNA, 21 bp, Homo sapiens
tacttgaataattgacctgaa

SEQ ID NO: 4069 - DNA, 21 bp, Homo sapiens
gacgagtatggagtacttgaa

SEQ ID NO: 4070 - DNA, 21 bp, Homo sapiens
ctgaggttccctagagttcaa

SEQ ID NO: 4071 - DNA, 21 bp, Homo sapiens
cagcaagttcaatcaatgaca

SEQ ID NO: 4072 - DNA, 21 bp, Homo sapiens
aacgtggaatctggattctca

SEQ ID NO: 4073 - DNA, 21 bp, Homo sapiens
cgctataaaggtgctgagtaa

SEQ ID NO: 4074 - DNA, 21 bp, Homo sapiens
atggtctgtgctggctataaa

SEQ ID NO: 4075 - DNA, 21 bp, Homo sapiens
ccgcataactgaagccactaa

SEQ ID NO: 4076 - DNA, 21 bp, Homo sapiens
ctcggctgtgtgcatcctata

SEQ ID NO: 4077 - DNA, 21 bp, Homo sapiens
tccctcttcatgcttaatgaa

SEQ ID NO: 4078 - DNA, 21 bp, Homo sapiens
accggtgaatgtacagataat

SEQ ID NO: 4079 - DNA, 21 bp, Homo sapiens
ctcgggaagctggaaatataa

SEQ ID NO: 4080 - DNA, 21 bp, Homo sapiens
gccgataagatagaagatcaa

SEQ ID NO: 4081 - DNA, 21 bp, Homo sapiens
ctagatggctttctcagtata

SEQ ID NO: 4082 - DNA, 21 bp, Homo sapiens
acggaggagatagaacgttta

SEQ ID NO: 4083 - DNA, 21 bp, Homo sapiens
tcgggaaacacaggccattaa

SEQ ID NO: 4084 - DNA, 21 bp, Homo sapiens
tgggacttaaagggtcagtta

SEQ ID NO: 4085 - DNA, 21 bp, Homo sapiens
cagggctatcaaataaagaat

SEQ ID NO: 4086 - DNA, 21 bp, Homo sapiens
tcgggaaacacaggccattaa

SEQ ID NO: 4087 - DNA, 21 bp, Homo sapiens
ccacagtatccttattgccaa

SEQ ID NO: 4088 - DNA, 21 bp, Homo sapiens
caggacatctatgcaggttca

SEQ ID NO: 4089 - DNA, 21 bp, Homo sapiens
acagatggagtccttcctgaa

SEQ ID NO: 4090 - DNA, 21 bp, Homo sapiens
atccacatcctgaagaataaa

SEQ ID NO: 4091 - DNA, 21 bp, Homo sapiens
aagcagcaccatttcatcaaa

SEQ ID NO: 4092 - DNA, 21 bp, Homo sapiens
ctggtggaagccggagatcaa

SEQ ID NO: 4093 - DNA, 21 bp, Homo sapiens
ccaggagctgatgaacgtcaa

SEQ ID NO: 4094 - DNA, 21 bp, Homo sapiens
cagggtgacccagaagtccta

SEQ ID NO: 4095 - DNA, 21 bp, Homo sapiens
cagggccgtggttgtgaagaa

SEQ ID NO: 4096 - DNA, 21 bp, Homo sapiens
cagcatcattgctgaggtcaa

SEQ ID NO: 4097 - DNA, 21 bp, Homo sapiens
cgccaagagtgcagagctgaa

SEQ ID NO: 4098 - DNA, 21 bp, Homo sapiens
ctgcctttctgcaaacataaa

SEQ ID NO: 4099 - DNA, 21 bp, Homo sapiens
ctggcaatcaatacagcttca

SEQ ID NO: 4100 - DNA, 21 bp, Homo sapiens
caagtatgagacagagttgaa

SEQ ID NO: 4101 - DNA, 21 bp, Homo sapiens
atggtctggaaggagaacaaa

SEQ ID NO: 4102 - DNA, 21 bp, Homo sapiens
ccgaggcatcaccacaaatca

SEQ ID NO: 4103 - DNA, 21 bp, Homo sapiens
caataaattaatgtagccaaa

SEQ ID NO: 4104 - DNA, 21 bp, Homo sapiens
cagcagctgccggaaatgtta

SEQ ID NO: 4105 - DNA, 21 bp, Homo sapiens
cagcccttcacttaactccta

SEQ ID NO: 4106 - DNA, 21 bp, Homo sapiens
caggtcttgctattcagtgaa

SEQ ID NO: 4107 - DNA, 21 bp, Homo sapiens
ccgaaacagcaacgcctgtaa

SEQ ID NO: 4108 - DNA, 21 bp, Homo sapiens
taccaagatcctgttacttta

SEQ ID NO: 4109 - DNA, 21 bp, Homo sapiens
agggaatttgtgacagctata

SEQ ID NO: 4110 - DNA, 21 bp, Homo sapiens
tccgttcactcctaaaggata

SEQ ID NO: 4111 - DNA, 21 bp, Homo sapiens
cgggtgaacctgactcgtcta

SEQ ID NO: 4112 - DNA, 21 bp, Homo sapiens
ccaggccacctttgaacgcta

SEQ ID NO: 4113 - DNA, 21 bp, Homo sapiens
caggtacttgatatttcctaa

SEQ ID NO: 4114 - DNA, 21 bp, Homo sapiens
gcgagataggcttgcacttaa

SEQ ID NO: 4115 - DNA, 21 bp, Homo sapiens
acagttacacttgacagacaa

SEQ ID NO: 4116 - DNA, 21 bp, Homo sapiens
accggttgggtcagagttcca

SEQ ID NO: 4117 - DNA, 21 bp, Homo sapiens
ttggcatgccattgaaactaa

SEQ ID NO: 4118 - DNA, 21 bp, Homo sapiens
aagagggatttgagagaataa

SEQ ID NO: 4119 - DNA, 21 bp, Homo sapiens
cacgtaatgcattgcctgtaa

SEQ ID NO: 4120 - DNA, 21 bp, Homo sapiens
cacgagaaatgcaacacgtta

SEQ ID NO: 4121 - DNA, 21 bp, Homo sapiens
cagtacgctatgaaactacaa

SEQ ID NO: 4122 - DNA, 21 bp, Homo sapiens
ctggagcatttcagataaata

SEQ ID NO: 4123 - DNA, 21 bp, Homo sapiens
ctggaacctattcagttaata

SEQ ID NO: 4124 - DNA, 21 bp, Homo sapiens
taaggactatagtgatttaaa

SEQ ID NO: 4125 - DNA, 21 bp, Homo sapiens
aagactcaagtatagattaaa

SEQ ID NO: 4126 - DNA, 21 bp, Homo sapiens
tagcaattaaattctagtgaa

SEQ ID NO: 4127 - DNA, 21 bp, Homo sapiens
cagaagacagtcttaatataa

SEQ ID NO: 4128 - DNA, 21 bp, Homo sapiens
taaggtagctttagcaattaa

SEQ ID NO: 4129 - DNA, 21 bp, Homo sapiens
ctggctggatctcaacatgtt

SEQ ID NO: 4130 - DNA, 21 bp, Homo sapiens
aaccagatgtggtgaactgga

SEQ ID NO: 4131 - DNA, 21 bp, Homo sapiens
cagcatcaagctgaaagagga

SEQ ID NO: 4132 - DNA, 21 bp, Homo sapiens
aacagcatctcaacatggtct

SEQ ID NO: 4133 - DNA, 21 bp, Homo sapiens
ctacgggacattcaccatcaa

SEQ ID NO: 4134 - DNA, 21 bp, Homo sapiens
cgccattacaccaatgcttca

SEQ ID NO: 4135 - DNA, 21 bp, Homo sapiens
aggcatcaagttgaccatcaa

SEQ ID NO: 4136 - DNA, 21 bp, Homo sapiens
aagggccaggactttatctaa

SEQ ID NO: 4137 - DNA, 21 bp, Homo sapiens
aaggatcagctgatttataat

SEQ ID NO: 4138 - DNA, 21 bp, Homo sapiens
cagatttggcagagagtataa

SEQ ID NO: 4139 - DNA, 21 bp, Homo sapiens
cagctgatttataatcttcta

SEQ ID NO: 4140 - DNA, 21 bp, Homo sapiens
aagtccaatatggcaactcta

SEQ ID NO: 4141 - DNA, 21 bp, Homo sapiens
cgccaacaccatcgtgtgcaa

SEQ ID NO: 4142 - DNA, 21 bp, Homo sapiens
cgccagcaacctgaatctcaa

SEQ ID NO: 4143 - DNA, 21 bp, Homo sapiens
gacggtgacttcaagatcaaa

SEQ ID NO: 4144 - DNA, 21 bp, Homo sapiens
caccatcgtgtgcaacagcaa

SEQ ID NO: 4145 - DNA, 21 bp, Homo sapiens
caagctgaacctgcatttcaa

SEQ ID NO: 4146 - DNA, 21 bp, Homo sapiens
cactgatggctttgtaattaa

SEQ ID NO: 4147 - DNA, 21 bp, Homo sapiens
cacggtcatcctgactgccaa

SEQ ID NO: 4148 - DNA, 21 bp, Homo sapiens
ctgaggctcagcttcaagaaa

SEQ ID NO: 4149 - DNA, 21 bp, Homo sapiens
cagcttcctcttccaggacaa

SEQ ID NO: 4150 - DNA, 21 bp, Homo sapiens
cagcttcaagaaattactgga

SEQ ID NO: 4151 - DNA, 21 bp, Homo sapiens
ctcctttcccagtgtccttaa

SEQ ID NO: 4152 - DNA, 21 bp, Homo sapiens
cccaccatcaacagactggaa

SEQ ID NO: 4153 - DNA, 21 bp, Homo sapiens
caagaccattatcaactccta

SEQ ID NO: 4154 - DNA, 21 bp, Homo sapiens
ttggaagcctttacccattaa

SEQ ID NO: 4155 - DNA, 21 bp, Homo sapiens
tgggtcgatcacaatcaacaa

SEQ ID NO: 4156 - DNA, 21 bp, Homo sapiens
tgcagattcgatattagtaaa

SEQ ID NO: 4157 - DNA, 21 bp, Homo sapiens
cagctggttgaaggtcaacaa

SEQ ID NO: 4158 - DNA, 21 bp, Homo sapiens
ctgggaagagctggaagataa

SEQ ID NO: 4159 - DNA, 21 bp, Homo sapiens
cacccgaatccgagatgataa

SEQ ID NO: 4160 - DNA, 21 bp, Homo sapiens
ctggaagataatgagaaggaa

SEQ ID NO: 4161 - DNA, 21 bp, Homo sapiens
cagaggtttctgggagaccta

SEQ ID NO: 4162 - DNA, 21 bp, Homo sapiens
gagcatctaggaagtattaaa

SEQ ID NO: 4163 - DNA, 21 bp, Homo sapiens
ctgcctggtccgcgagaacaa

SEQ ID NO: 4164 - DNA, 21 bp, Homo sapiens
caccatggactttggcctcaa

SEQ ID NO: 4165 - DNA, 21 bp, Homo sapiens
tacctggtctcggaaacataa

SEQ ID NO: 4166 - DNA, 21 bp, Homo sapiens
cacgtttgcactcatgtcata

SEQ ID NO: 4167 - DNA, 21 bp, Homo sapiens
ctgacttaagcgaggtataaa

SEQ ID NO: 4168 - DNA, 21 bp, Homo sapiens
cccgctactgtcgttattgat

SEQ ID NO: 4169 - DNA, 21 bp, Homo sapiens
aagtttatcattaccagttaa

SEQ ID NO: 4170 - DNA, 21 bp, Homo sapiens
ctgaagacgatcagagtcaaa

SEQ ID NO: 4171 - DNA, 21 bp, Homo sapiens
aaaggaattgctagtaataaa

SEQ ID NO: 4172 - DNA, 21 bp, Homo sapiens
caggagaaacccagcaaagaa

SEQ ID NO: 4173 - DNA, 21 bp, Homo sapiens
tcggaatgttacaatggtaaa

SEQ ID NO: 4174 - DNA, 21 bp, Homo sapiens
caggaagagatttaacactaa

SEQ ID NO: 4175 - DNA, 21 bp, Homo sapiens
aagcgccagaatggagatgat

SEQ ID NO: 4176 - DNA, 21 bp, Homo sapiens
cccaccaaagttcaccctgaa

SEQ ID NO: 4177 - DNA, 21 bp, Homo sapiens
ccggctgcgcaacaagtccaa

SEQ ID NO: 4178 - DNA, 21 bp, Homo sapiens
ccaggagcttctggacatcaa

SEQ ID NO: 4179 - DNA, 21 bp, Homo sapiens
ccgcttcctgatgcgagtcaa

SEQ ID NO: 4180 - DNA, 21 bp, Homo sapiens
cagcagatcgtggccatggaa

SEQ ID NO: 4181 - DNA, 21 bp, Homo sapiens
cagggcacaattatacgttga

SEQ ID NO: 4182 - DNA, 21 bp, Homo sapiens
ccgctttatcaaatatgccta

SEQ ID NO: 4183 - DNA, 21 bp, Homo sapiens
tccaatggaactcaaagccta

SEQ ID NO: 4184 - DNA, 21 bp, Homo sapiens
cacgtaaatgccaaccatcta

SEQ ID NO: 4185 - DNA, 21 bp, Homo sapiens
aagctggctactcgacatcta

SEQ ID NO: 4186 - DNA, 21 bp, Homo sapiens
ctgcacaatttcaccgtatta

SEQ ID NO: 4187 - DNA, 21 bp, Homo sapiens
aactactacgatacttatgaa

SEQ ID NO: 4188 - DNA, 21 bp, Homo sapiens
ctggaactttagtgaaacata

SEQ ID NO: 4189 - DNA, 21 bp, Homo sapiens
caaggtgcacgtgaacccaaa

SEQ ID NO: 4190 - DNA, 21 bp, Homo sapiens
tcgctacgtttctgcaacaaa

SEQ ID NO: 4191 - DNA, 21 bp, Homo sapiens
ctcgagattccggaaagcata

SEQ ID NO: 4192 - DNA, 21 bp, Homo sapiens
ccggagttgcctgctcagaaa

SEQ ID NO: 4193 - DNA, 21 bp, Homo sapiens
caggcaatgagaagtccatta

SEQ ID NO: 4194 - DNA, 21 bp, Homo sapiens
ccagtctattatagtcacata

SEQ ID NO: 4195 - DNA, 21 bp, Homo sapiens
ctgggaaagtatagcatgaaa

SEQ ID NO: 4196 - DNA, 21 bp, Homo sapiens
cagattatctttgggatttaa

SEQ ID NO: 4197 - DNA, 21 bp, Homo sapiens
ccgcctggatttctcctgtaa

SEQ ID NO: 4198 - DNA, 21 bp, Homo sapiens
cagcgttgatagtggcagcaa

SEQ ID NO: 4199 - DNA, 21 bp, Homo sapiens
ttggctccattcagagaccaa

SEQ ID NO: 4200 - DNA, 21 bp, Homo sapiens
gctggttgtgttgacaataaa

SEQ ID NO: 4201 - DNA, 21 bp, Homo sapiens
cagcgtgttgacaaatactca

SEQ ID NO: 4202 - DNA, 21 bp, Homo sapiens
ccgcaaagtactgatcaacaa

SEQ ID NO: 4203 - DNA, 21 bp, Homo sapiens
ccgcgcggtgctcatcaacaa

SEQ ID NO: 4204 - DNA, 21 bp, Homo sapiens
caggaaatcattcgcaacaaa

SEQ ID NO: 4205 - DNA, 21 bp, Homo sapiens
ctggacggactcagagaccaa

SEQ ID NO: 4206 - DNA, 21 bp, Homo sapiens
cccgttcggtctgacgcagta

SEQ ID NO: 4207 - DNA, 21 bp, Homo sapiens
ctggatgggcaagaacctcta

SEQ ID NO: 4208 - DNA, 21 bp, Homo sapiens
cagggctgggagaactttgta

SEQ ID NO: 4209 - DNA, 21 bp, Homo sapiens
ctggaagaaactaaagcttga

SEQ ID NO: 4210 - DNA, 21 bp, Homo sapiens
taccatgcacagagtccttaa

SEQ ID NO: 4211 - DNA, 21 bp, Homo sapiens
caagtatggtctggacggaaa

SEQ ID NO: 4212 - DNA, 21 bp, Homo sapiens
cgggagttcctgcatcacaaa

SEQ ID NO: 4213 - DNA, 21 bp, Homo sapiens
ccgctccatagagaagagtaa

SEQ ID NO: 4214 - DNA, 21 bp, Homo sapiens
caaggagaaactgcaggtcaa

SEQ ID NO: 4215 - DNA, 21 bp, Homo sapiens
caggtggtcttctctgggaaa

SEQ ID NO: 4216 - DNA, 21 bp, Homo sapiens
ccggagctttcaaagaaggaa

SEQ ID NO: 4217 - DNA, 21 bp, Homo sapiens
caaggctgaccaagagagaaa

SEQ ID NO: 4218 - DNA, 21 bp, Homo sapiens
accctcgatgaagcccaataa

SEQ ID NO: 4219 - DNA, 21 bp, Homo sapiens
cccaatatatctaccattgta

SEQ ID NO: 4220 - DNA, 21 bp, Homo sapiens
ttgattaaatttggcatttaa

SEQ ID NO: 4221 - DNA, 21 bp, Homo sapiens
ctgggtatgaatgctactgta

SEQ ID NO: 4222 - DNA, 21 bp, Homo sapiens
taccgggttataagcgggtta

SEQ ID NO: 4223 - DNA, 21 bp, Homo sapiens
ccgctactgcgtggatgtgaa

SEQ ID NO: 4224 - DNA, 21 bp, Homo sapiens
ccgggacagatctcagcagaa

SEQ ID NO: 4225 - DNA, 21 bp, Homo sapiens
tacatctacaatggaccagta

SEQ ID NO: 4226 - DNA, 21 bp, Homo sapiens
ccggcgggtctatgactatca

SEQ ID NO: 4227 - DNA, 21 bp, Homo sapiens
aaagggagtcattaacaacta

SEQ ID NO: 4228 - DNA, 21 bp, Homo sapiens
ccgccacacggtcacctgcaa

SEQ ID NO: 4229 - DNA, 21 bp, Homo sapiens
acccttgatggtggtttcata

SEQ ID NO: 4230 - DNA, 21 bp, Homo sapiens
cagccacgaactcactattat

SEQ ID NO: 4231 - DNA, 21 bp, Homo sapiens
cagagagagcacagtgtttga

SEQ ID NO: 4232 - DNA, 21 bp, Homo sapiens
aagcagtgaccctgatcctaa

SEQ ID NO: 4233 - DNA, 21 bp, Homo sapiens
cagggatattgccgcccggaa

SEQ ID NO: 4234 - DNA, 21 bp, Homo sapiens
ccgggccttgctcccagtcaa

SEQ ID NO: 4235 - DNA, 21 bp, Homo sapiens
cctgcagatgcttctaataaa

SEQ ID NO: 4236 - DNA, 21 bp, Homo sapiens
acagatctttggagtgcctaa

SEQ ID NO: 4237 - DNA, 21 bp, Homo sapiens
ctccgagtcactaatgtgcaa

SEQ ID NO: 4238 - DNA, 21 bp, Homo sapiens
cccaataattgcagaactaaa

SEQ ID NO: 4239 - DNA, 21 bp, Homo sapiens
cgggaaatatgggatgtataa

SEQ ID NO: 4240 - DNA, 21 bp, Homo sapiens
cccggacgacttgtctttcaa

SEQ ID NO: 4241 - DNA, 21 bp, Homo sapiens
tcggcgcaaaggagacgttta

SEQ ID NO: 4242 - DNA, 21 bp, Homo sapiens
ttgcgacattgtgaaggctta

SEQ ID NO: 4243 - DNA, 21 bp, Homo sapiens
cccgggatcgtttgcaagtaa

SEQ ID NO: 4244 - DNA, 21 bp, Homo sapiens
ctcgaaataagtggtactatt

SEQ ID NO: 4245 - DNA, 21 bp, Homo sapiens
ttcacttgtattcatttgtaa

SEQ ID NO: 4246 - DNA, 21 bp, Homo sapiens
tcacaggatgtcagtgtttaa

SEQ ID NO: 4247 - DNA, 21 bp, Homo sapiens
cagtagcagatcaactcacaa

SEQ ID NO: 4248 - DNA, 21 bp, Homo sapiens
tacgttgagtttattaacaaa

SEQ ID NO: 4249 - DNA, 21 bp, Homo sapiens
ccgaatcaagtcgacacacta

SEQ ID NO: 4250 - DNA, 21 bp, Homo sapiens
agccaaattgcacataaagaa

SEQ ID NO: 4251 - DNA, 21 bp, Homo sapiens
aagagtcgggaccacagttta

SEQ ID NO: 4252 - DNA, 21 bp, Homo sapiens
ctgaaagtaactcataatcta

SEQ ID NO: 4253 - DNA, 21 bp, Homo sapiens
tccgccttcgttcatttacta

SEQ ID NO: 4254 - DNA, 21 bp, Homo sapiens
atggatatttgtactgtttaa

SEQ ID NO: 4255 - DNA, 21 bp, Homo sapiens
ttggaagttaagaattgatta

SEQ ID NO: 4256 - DNA, 21 bp, Homo sapiens
cacacacaccttggtaacata

SEQ ID NO: 4257 - DNA, 21 bp, Homo sapiens
aaccggaattccactattgaa

SEQ ID NO: 4258 - DNA, 21 bp, Homo sapiens
caggactttgtgtacagttaa

SEQ ID NO: 4259 - DNA, 21 bp, Homo sapiens
ccgctgttccagtgtgtctta

SEQ ID NO: 4260 - DNA, 21 bp, Homo sapiens
atcaagggatttcctatggaa

SEQ ID NO: 4261 - DNA, 21 bp, Homo sapiens
aagagattcgaatgacggtaa

SEQ ID NO: 4262 - DNA, 21 bp, Homo sapiens
aaggagcaccttgacagactt

SEQ ID NO: 4263 - DNA, 21 bp, Homo sapiens
cagcctcaaggtcttcaacaa

SEQ ID NO: 4264 - DNA, 21 bp, Homo sapiens
ttggacttctttctaatgtaa

SEQ ID NO: 4265 - DNA, 21 bp, Homo sapiens
cactcgctgtacagaatgata

SEQ ID NO: 4266 - DNA, 21 bp, Homo sapiens
cccggtgattgtggagatgaa

SEQ ID NO: 4267 - DNA, 21 bp, Homo sapiens
ctcgctgtacagaatgatatt

SEQ ID NO: 4268 - DNA, 21 bp, Homo sapiens
atcgcgcaatgtgaccgtgaa

SEQ ID NO: 4269 - DNA, 21 bp, Homo sapiens
tcgacagatgcagtggttcta

SEQ ID NO: 4270 - DNA, 21 bp, Homo sapiens
cagggagttgatgaccttgtt

SEQ ID NO: 4271 - DNA, 21 bp, Homo sapiens
cccagaagtgagatagatgaa

SEQ ID NO: 4272 - DNA, 21 bp, Homo sapiens
aagaagatcttcaatcccaaa

SEQ ID NO: 4273 - DNA, 21 bp, Homo sapiens
tcagatggaagtcttcataaa

SEQ ID NO: 4274 - DNA, 21 bp, Homo sapiens
accctgtgaaatactttataa

SEQ ID NO: 4275 - DNA, 21 bp, Homo sapiens
cacccagaaattgagctggaa

SEQ ID NO: 4276 - DNA, 21 bp, Homo sapiens
ctcgctcttgcgggcgcctaa

SEQ ID NO: 4277 - DNA, 21 bp, Homo sapiens
cagcctgtgttcgtagtgcaa

SEQ ID NO: 4278 - DNA, 21 bp, Homo sapiens
caggatgctggcgttatccaa

SEQ ID NO: 4279 - DNA, 21 bp, Homo sapiens
gcgccttgattatcaagataa

SEQ ID NO: 4280 - DNA, 21 bp, Homo sapiens
cgccaaggagctggtcgatta

SEQ ID NO: 4281 - DNA, 21 bp, Homo sapiens
tcgacccacctggaaactgaa

SEQ ID NO: 4282 - DNA, 21 bp, Homo sapiens
gcggagtatcggagccactaa

SEQ ID NO: 4283 - DNA, 21 bp, Homo sapiens
ttgcatatttggattacaata

SEQ ID NO: 4284 - DNA, 21 bp, Homo sapiens
accctggtgtgaggacataaa

SEQ ID NO: 4285 - DNA, 21 bp, Homo sapiens
acgctgaaccatgaacattat

SEQ ID NO: 4286 - DNA, 21 bp, Homo sapiens
cagatgtgcctagacacgaaa

SEQ ID NO: 4287 - DNA, 21 bp, Homo sapiens
cgggaaggtgcagataattaa

SEQ ID NO: 4288 - DNA, 21 bp, Homo sapiens
ttaggcaacatccatcataaa

SEQ ID NO: 4289 - DNA, 21 bp, Homo sapiens
cagtgtgcaaatagtctacaa

SEQ ID NO: 4290 - DNA, 21 bp, Homo sapiens
ccgccaggagttcgaagtgat

SEQ ID NO: 4291 - DNA, 21 bp, Homo sapiens
cagcgagggattcacggcgaa

SEQ ID NO: 4292 - DNA, 21 bp, Homo sapiens
taggagctgaggataactata

SEQ ID NO: 4293 - DNA, 21 bp, Homo sapiens
ctgcataacccgagacctcaa

SEQ ID NO: 4294 - DNA, 21 bp, Homo sapiens
ctcgacatggcaaccaatata

SEQ ID NO: 4295 - DNA, 21 bp, Homo sapiens
cccatatgcatgagatactaa

SEQ ID NO: 4296 - DNA, 21 bp, Homo sapiens
gagatactaattaatgatgaa

SEQ ID NO: 4297 - DNA, 21 bp, Homo sapiens
acagttgagactgtcgtctaa

SEQ ID NO: 4298 - DNA, 21 bp, Homo sapiens
aagtatctcctaaatgtgata

SEQ ID NO: 4299 - DNA, 21 bp, Homo sapiens
cagcaggatcctgatgccaaa

SEQ ID NO: 4300 - DNA, 21 bp, Homo sapiens
caacagtttaatgaagatcta

SEQ ID NO: 4301 - DNA, 21 bp, Homo sapiens
caccactgtgagtgtagccaa

SEQ ID NO: 4302 - DNA, 21 bp, Homo sapiens
caccttgaatgccgacaagaa

SEQ ID NO: 4303 - DNA, 21 bp, Homo sapiens
aaggtcagctcgtatcttcaa

SEQ ID NO: 4304 - DNA, 21 bp, Homo sapiens
ttggtaggaaatagaatgaaa

SEQ ID NO: 4305 - DNA, 21 bp, Homo sapiens
ccgcgacgtctaccacctgaa

SEQ ID NO: 4306 - DNA, 21 bp, Homo sapiens
cgcgtctgccttggagaagaa

SEQ ID NO: 4307 - DNA, 21 bp, Homo sapiens
aagagagttccgggaaacata

SEQ ID NO: 4308 - DNA, 21 bp, Homo sapiens
ccgggaacagagaatgtttaa

SEQ ID NO: 4309 - DNA, 21 bp, Homo sapiens
cctgaggataactcaatataa

SEQ ID NO: 4310 - DNA, 21 bp, Homo sapiens
aaggatgattctgcctccaaa

SEQ ID NO: 4311 - DNA, 21 bp, Homo sapiens
tagggttcccttatattaata

SEQ ID NO: 4312 - DNA, 21 bp, Homo sapiens
tacgatgtttagtaacctcaa

SEQ ID NO: 4313 - DNA, 21 bp, Homo sapiens
caagtcaagatttccatataa

SEQ ID NO: 4314 - DNA, 21 bp, Homo sapiens
cacattgagtctatcaatcaa

SEQ ID NO: 4315 - DNA, 21 bp, Homo sapiens
cacggccggacccaagatgaa

SEQ ID NO: 4316 - DNA, 21 bp, Homo sapiens
cagttaaatgagaacatgaaa

SEQ ID NO: 4317 - DNA, 21 bp, Homo sapiens
ccaggaaagtctggtaataaa

SEQ ID NO: 4318 - DNA, 21 bp, Homo sapiens
caggaaagtctggtaataaat

SEQ ID NO: 4319 - DNA, 21 bp, Homo sapiens
cacgctcttcatcgcctacta

SEQ ID NO: 4320 - DNA, 21 bp, Homo sapiens
caccagggctttggccttaaa

SEQ ID NO: 4321 - DNA, 21 bp, Homo sapiens
caccatctacctactcaacaa

SEQ ID NO: 4322 - DNA, 21 bp, Homo sapiens
tcgcttcatgtctcacttcaa

SEQ ID NO: 4323 - DNA, 21 bp, Homo sapiens
ctgggagaccatcaccatcta

SEQ ID NO: 4324 - DNA, 21 bp, Homo sapiens
cggcattgtcttcatcctgta

SEQ ID NO: 4325 - DNA, 21 bp, Homo sapiens
cagctggttaaagaagacaaa

SEQ ID NO: 4326 - DNA, 21 bp, Homo sapiens
tacacacattatggctgtaaa

SEQ ID NO: 4327 - DNA, 21 bp, Homo sapiens
ccgaacttgtagttgaagtta

SEQ ID NO: 4328 - DNA, 21 bp, Homo sapiens
aagaccgaacttgtagttgaa

SEQ ID NO: 4329 - DNA, 21 bp, Homo sapiens
tagaatgtcatcggcaaataa

SEQ ID NO: 4330 - DNA, 21 bp, Homo sapiens
cacgtactaaatgaactgata

SEQ ID NO: 4331 - DNA, 21 bp, Homo sapiens
tggctatattggaaacttaaa

SEQ ID NO: 4332 - DNA, 21 bp, Homo sapiens
agggactatagctcaagtaaa

SEQ ID NO: 4333 - DNA, 21 bp, Homo sapiens
cagggaatttatcagagcaaa

SEQ ID NO: 4334 - DNA, 21 bp, Homo sapiens
cggcaggtatgaccagtataa

SEQ ID NO: 4335 - DNA, 21 bp, Homo sapiens
atccaggttgaaggcattcaa

SEQ ID NO: 4336 - DNA, 21 bp, Homo sapiens
cacgatttgacttgctcttca

SEQ ID NO: 4337 - DNA, 21 bp, Homo sapiens
gcccagtatgtagacaaccaa

SEQ ID NO: 4338 - DNA, 21 bp, Homo sapiens
ccggatcttgatgctggtgta

SEQ ID NO: 4339 - DNA, 21 bp, Homo sapiens
caggcaaatgtgcaataccaa

SEQ ID NO: 4340 - DNA, 21 bp, Homo sapiens
aacctgaaatttattcacata

SEQ ID NO: 4341 - DNA, 21 bp, Homo sapiens
cacagtgagagctgccttata

SEQ ID NO: 4342 - DNA, 21 bp, Homo sapiens
tgggaagatgtggtacagaaa

SEQ ID NO: 4343 - DNA, 21 bp, Homo sapiens
caggcttgactgggtggacaa

SEQ ID NO: 4344 - DNA, 21 bp, Homo sapiens
ctcaattcactttgtaagaaa

SEQ ID NO: 4345 - DNA, 21 bp, Homo sapiens
aaggacggaccgggatgatta

SEQ ID NO: 4346 - DNA, 21 bp, Homo sapiens
gacacctatgatgatagctta

SEQ ID NO: 4347 - DNA, 21 bp, Homo sapiens
ccgggatgattatgtgaacat

SEQ ID NO: 4348 - DNA, 21 bp, Homo sapiens
gaggctgaaccgaatgtacaa

SEQ ID NO: 4349 - DNA, 21 bp, Homo sapiens
cgcgcatggctgcgtcattaa

SEQ ID NO: 4350 - DNA, 21 bp, Homo sapiens
cacgtggatttggtagagaaa

SEQ ID NO: 4351 - DNA, 21 bp, Homo sapiens
cagaatatgcctacgtgctaa

SEQ ID NO: 4352 - DNA, 21 bp, Homo sapiens
ctggtgtataccataaccgat

SEQ ID NO: 4353 - DNA, 21 bp, Homo sapiens
ctggactgtgacgacatctat

SEQ ID NO: 4354 - DNA, 21 bp, Homo sapiens
ccgcggctggaatgactacaa

SEQ ID NO: 4355 - DNA, 21 bp, Homo sapiens
cagaagagattcaatggctca

SEQ ID NO: 4356 - DNA, 21 bp, Homo sapiens
aactggcttcatacacacaaa

SEQ ID NO: 4357 - DNA, 21 bp, Homo sapiens
atgcttatttgtttaagtcaa

SEQ ID NO: 4358 - DNA, 21 bp, Homo sapiens
ctggctaatgtctctcagtca

SEQ ID NO: 4359 - DNA, 21 bp, Homo sapiens
ctggccgttggccctggctaa

SEQ ID NO: 4360 - DNA, 21 bp, Homo sapiens
caagacaatcatccacagcta

SEQ ID NO: 4361 - DNA, 21 bp, Homo sapiens
aagcgagatggtagtacaatt

SEQ ID NO: 4362 - DNA, 21 bp, Homo sapiens
cagaaatgtctaaatgctgaa

SEQ ID NO: 4363 - DNA, 21 bp, Homo sapiens
tactgtgaaactggcactgaa

SEQ ID NO: 4364 - DNA, 21 bp, Homo sapiens
cactgaattaatcatctataa

SEQ ID NO: 4365 - DNA, 21 bp, Homo sapiens
aagctgctgaaggttgtgaaa

SEQ ID NO: 4366 - DNA, 21 bp, Homo sapiens
ccggctcttcaccatcccgtt

SEQ ID NO: 4367 - DNA, 21 bp, Homo sapiens
aaggttgtgaaattcggagaa

SEQ ID NO: 4368 - DNA, 21 bp, Homo sapiens
caccagacaggtgttatggaa

SEQ ID NO: 4369 - DNA, 21 bp, Homo sapiens
caagatggctgtcctctctaa

SEQ ID NO: 4370 - DNA, 21 bp, Homo sapiens
ctggtgctgccagctttataa

SEQ ID NO: 4371 - DNA, 21 bp, Homo sapiens
atggctgtcctctctaaggaa

SEQ ID NO: 4372 - DNA, 21 bp, Homo sapiens
ccagaacacgttggaagtgta

SEQ ID NO: 4373 - DNA, 21 bp, Homo sapiens
accaataagtattctgtgtta

SEQ ID NO: 4374 - DNA, 21 bp, Homo sapiens
ccacccgaacgtcttatctaa

SEQ ID NO: 4375 - DNA, 21 bp, Homo sapiens
ccggtggagatcccacccgaa

SEQ ID NO: 4376 - DNA, 21 bp, Homo sapiens
caggtagacagtatataacta

SEQ ID NO: 4377 - DNA, 21 bp, Homo sapiens
ccgctgtgctgtatagcgtta

SEQ ID NO: 4378 - DNA, 21 bp, Homo sapiens
ccgaggaaacctagcactcaa

SEQ ID NO: 4379 - DNA, 21 bp, Homo sapiens
ccggctcaagagtatttctga

SEQ ID NO: 4380 - DNA, 21 bp, Homo sapiens
cccgatgtctccaatggacaa

SEQ ID NO: 4381 - DNA, 21 bp, Homo sapiens
atcgatgacatcattagccta

SEQ ID NO: 4382 - DNA, 21 bp, Homo sapiens
cagcctacaactgaatagcaa

SEQ ID NO: 4383 - DNA, 21 bp, Homo sapiens
tagcctagaatcaagttataa

SEQ ID NO: 4384 - DNA, 21 bp, Homo sapiens
catgatggtatctatagtcaa

SEQ ID NO: 4385 - DNA, 21 bp, Homo sapiens
caacattgcctgaataactta

SEQ ID NO: 4386 - DNA, 21 bp, Homo sapiens
tgcgtcggttgtaggactaaa

SEQ ID NO: 4387 - DNA, 21 bp, Homo sapiens
tcggaagagacgagaagccta

SEQ ID NO: 4388 - DNA, 21 bp, Homo sapiens
tacgatgggatcattatttca

SEQ ID NO: 4389 - DNA, 21 bp, Homo sapiens
gagggagagctcataatcgta

SEQ ID NO: 4390 - DNA, 21 bp, Homo sapiens
caggagttcatcaatatgaat

SEQ ID NO: 4391 - DNA, 21 bp, Homo sapiens
gaccgagctcatgtcattaaa

SEQ ID NO: 4392 - DNA, 21 bp, Homo sapiens
gaccaatctcttgctgttaaa

SEQ ID NO: 4393 - DNA, 21 bp, Homo sapiens
cagcaaataaagcatgaaata

SEQ ID NO: 4394 - DNA, 21 bp, Homo sapiens
aaggaacggaataaagggcaa

SEQ ID NO: 4395 - DNA, 21 bp, Homo sapiens
ccagctgggcttggaaggaaa

SEQ ID NO: 4396 - DNA, 21 bp, Homo sapiens
ctccaagatggtatcccgtaa

SEQ ID NO: 4397 - DNA, 21 bp, Homo sapiens
caaggcctccaccttctctaa

SEQ ID NO: 4398 - DNA, 21 bp, Homo sapiens
ccggccttgaccggaggagaa

SEQ ID NO: 4399 - DNA, 21 bp, Homo sapiens
ccggaggagaaacgtcttcga

SEQ ID NO: 4400 - DNA, 21 bp, Homo sapiens
cccgacgtctggaggactcaa

SEQ ID NO: 4401 - DNA, 21 bp, Homo sapiens
tagctctacagtccactttaa

SEQ ID NO: 4402 - DNA, 21 bp, Homo sapiens
cagcagttgggccatattgaa

SEQ ID NO: 4403 - DNA, 21 bp, Homo sapiens
ctctataataattcaactcaa

SEQ ID NO: 4404 - DNA, 21 bp, Homo sapiens
atgccggtatgtattgtccaa

SEQ ID NO: 4405 - DNA, 21 bp, Homo sapiens
ccagacctagtctttaatgaa

SEQ ID NO: 4406 - DNA, 21 bp, Homo sapiens
cagcaattaattagatcaaca

SEQ ID NO: 4407 - DNA, 21 bp, Homo sapiens
ccacgaggaagcagcaattaa

SEQ ID NO: 4408 - DNA, 21 bp, Homo sapiens
caacattaccttgtctttcaa

SEQ ID NO: 4409 - DNA, 21 bp, Homo sapiens
aacgggaatgtatctttgtaa

SEQ ID NO: 4410 - DNA, 21 bp, Homo sapiens
caagattatacaatctcttta

SEQ ID NO: 4411 - DNA, 21 bp, Homo sapiens
ttcagttgcagtagtatcaaa

SEQ ID NO: 4412 - DNA, 21 bp, Homo sapiens
caccattaggtcacttaagaa

SEQ ID NO: 4413 - DNA, 21 bp, Homo sapiens
aacgcactaacttgacctaca

SEQ ID NO: 4414 - DNA, 21 bp, Homo sapiens
atggaccaacacctccgcaaa

SEQ ID NO: 4415 - DNA, 21 bp, Homo sapiens
ccgaagaaacatggaccaaca

SEQ ID NO: 4416 - DNA, 21 bp, Homo sapiens
tcccaaggatatatcaaacta

SEQ ID NO: 4417 - DNA, 21 bp, Homo sapiens
gacagtaatctcattgttaaa

SEQ ID NO: 4418 - DNA, 21 bp, Homo sapiens
caggatggtgacacacatatt

SEQ ID NO: 4419 - DNA, 21 bp, Homo sapiens
gagcctaaggttgatgctgta

SEQ ID NO: 4420 - DNA, 21 bp, Homo sapiens
gacacacatattaaagagtaa

SEQ ID NO: 4421 - DNA, 21 bp, Homo sapiens
ccggagcgctgagccagacaa

SEQ ID NO: 4422 - DNA, 21 bp, Homo sapiens
caccaaatactggaaattcga

SEQ ID NO: 4423 - DNA, 21 bp, Homo sapiens
ctggctctttcgagaagcgaa

SEQ ID NO: 4424 - DNA, 21 bp, Homo sapiens
tacatttatttctgtaaataa

SEQ ID NO: 4425 - DNA, 21 bp, Homo sapiens
cacaagatcgtcttctttaaa

SEQ ID NO: 4426 - DNA, 21 bp, Homo sapiens
aaggacaataacgtagaggaa

SEQ ID NO: 4427 - DNA, 21 bp, Homo sapiens
ctgggtgttcaaggacaataa

SEQ ID NO: 4428 - DNA, 21 bp, Homo sapiens
atgacaggacttatttcttta

SEQ ID NO: 4429 - DNA, 21 bp, Homo sapiens
atcggtgtgtaaggtggccta

SEQ ID NO: 4430 - DNA, 21 bp, Homo sapiens
ctccattatgaggcccttcta

SEQ ID NO: 4431 - DNA, 21 bp, Homo sapiens
caggctggagtgcaatgacat

SEQ ID NO: 4432 - DNA, 21 bp, Homo sapiens
cagggatgatggagagttcat

SEQ ID NO: 4433 - DNA, 21 bp, Homo sapiens
caggtcttgctccgctatcaa

SEQ ID NO: 4434 - DNA, 21 bp, Homo sapiens
cagctttgtgggatccaacaa

SEQ ID NO: 4435 - DNA, 21 bp, Homo sapiens
tgcgatcatccggacatcaaa

SEQ ID NO: 4436 - DNA, 21 bp, Homo sapiens
aaccatcatctcgaatgtcaa

SEQ ID NO: 4437 - DNA, 21 bp, Homo sapiens
ctagcgattgacaagcaataa

SEQ ID NO: 4438 - DNA, 21 bp, Homo sapiens
aacggccgagtttgtccctta

SEQ ID NO: 4439 - DNA, 21 bp, Homo sapiens
acggcgcagcctgaagaacaa

SEQ ID NO: 4440 - DNA, 21 bp, Homo sapiens
ccagttcttccaagtgtctaa

SEQ ID NO: 4441 - DNA, 21 bp, Homo sapiens
caagacctacgaggacatcaa

SEQ ID NO: 4442 - DNA, 21 bp, Homo sapiens
caccaagagagtgtttcttca

SEQ ID NO: 4443 - DNA, 21 bp, Homo sapiens
caggaattccgttgacttgtt

SEQ ID NO: 4444 - DNA, 21 bp, Homo sapiens
aaccaagtgctaaatcttgta

SEQ ID NO: 4445 - DNA, 21 bp, Homo sapiens
tgcgattcagttcaccgctaa

SEQ ID NO: 4446 - DNA, 21 bp, Homo sapiens
cacatctttattgaacttgaa

SEQ ID NO: 4447 - DNA, 21 bp, Homo sapiens
cccgacatttcttcataggta

SEQ ID NO: 4448 - DNA, 21 bp, Homo sapiens
aagggttatttgagcaagtaa

SEQ ID NO: 4449 - DNA, 21 bp, Homo sapiens
cagaaacttaatagccagtat

SEQ ID NO: 4450 - DNA, 21 bp, Homo sapiens
accaattctgttgtaaataaa

SEQ ID NO: 4451 - DNA, 21 bp, Homo sapiens
caaggatatgatatcatggaa

SEQ ID NO: 4452 - DNA, 21 bp, Homo sapiens
tccaggcatgcttgtgttgaa

SEQ ID NO: 4453 - DNA, 21 bp, Homo sapiens
ttgataagctattgtctgtaa

SEQ ID NO: 4454 - DNA, 21 bp, Homo sapiens
cccatgggctatcaacttaat

SEQ ID NO: 4455 - DNA, 21 bp, Homo sapiens
aaccattaacatgagattaga

SEQ ID NO: 4456 - DNA, 21 bp, Homo sapiens
tcgctcatattaattgatgaa

SEQ ID NO: 4457 - DNA, 21 bp, Homo sapiens
atcaattgtcttggatgccaa

SEQ ID NO: 4458 - DNA, 21 bp, Homo sapiens
atgcagtgaggtctaacataa

SEQ ID NO: 4459 - DNA, 21 bp, Homo sapiens
ttgccagacattagtggataa

SEQ ID NO: 4460 - DNA, 21 bp, Homo sapiens
taggaagactcccggattcta

SEQ ID NO: 4461 - DNA, 21 bp, Homo sapiens
caccttcatgatcgacctcaa

SEQ ID NO: 4462 - DNA, 21 bp, Homo sapiens
aagaaagatattgtttcttta

SEQ ID NO: 4463 - DNA, 21 bp, Homo sapiens
acccttcttggtagaagctaa

SEQ ID NO: 4464 - DNA, 21 bp, Homo sapiens
aaggaaattctgggtcttgaa

SEQ ID NO: 4465 - DNA, 21 bp, Homo sapiens
caggtctgcgtagatggtgaa

SEQ ID NO: 4466 - DNA, 21 bp, Homo sapiens
agggagtactatagtgttcaa

SEQ ID NO: 4467 - DNA, 21 bp, Homo sapiens
tgccattaagtttgagtatat

SEQ ID NO: 4468 - DNA, 21 bp, Homo sapiens
atggagcatccttctccgata

SEQ ID NO: 4469 - DNA, 21 bp, Homo sapiens
ctgcaagtgcaaagagtgcaa

SEQ ID NO: 4470 - DNA, 21 bp, Homo sapiens
ctgggctttctttgccctcat

SEQ ID NO: 4471 - DNA, 21 bp, Homo sapiens
aaatatgtgactgacaataaa

SEQ ID NO: 4472 - DNA, 21 bp, Homo sapiens
ctccaggctttctgccctaaa

SEQ ID NO: 4473 - DNA, 21 bp, Homo sapiens
gcctagcagtcgctccattta

SEQ ID NO: 4474 - DNA, 21 bp, Homo sapiens
cacgccgtccgggtgggccta

SEQ ID NO: 4475 - DNA, 21 bp, Homo sapiens
cagcacaaataggcagcttaa

SEQ ID NO: 4476 - DNA, 21 bp, Homo sapiens
atgaaaggtcatgataacaaa

SEQ ID NO: 4477 - DNA, 21 bp, Homo sapiens
ccgcgaggtggacacggtcta

SEQ ID NO: 4478 - DNA, 21 bp, Homo sapiens
ccgggtttcatctggaattaa

SEQ ID NO: 4479 - DNA, 21 bp, Homo sapiens
gaggtagaattatatggtgaa

SEQ ID NO: 4480 - DNA, 21 bp, Homo sapiens
acaggtgaatggattattcta

SEQ ID NO: 4481 - DNA, 21 bp, Homo sapiens
cagatcaccatccatcttcaa

SEQ ID NO: 4482 - DNA, 21 bp, Homo sapiens
atcgtttggtgccatcagtaa

SEQ ID NO: 4483 - DNA, 21 bp, Homo sapiens
aagcgccgagaggaagatgta

SEQ ID NO: 4484 - DNA, 21 bp, Homo sapiens
ctcgggagaaccaaaccggaa

SEQ ID NO: 4485 - DNA, 21 bp, Homo sapiens
aacctagtactctctgctcta

SEQ ID NO: 4486 - DNA, 21 bp, Homo sapiens
tgccctgtaacttatctagaa

SEQ ID NO: 4487 - DNA, 21 bp, Homo sapiens
cggcctcgctgtggccatcaa

SEQ ID NO: 4488 - DNA, 21 bp, Homo sapiens
ctgcctgaatgccattgtcta

SEQ ID NO: 4489 - DNA, 21 bp, Homo sapiens
cactagctacttactggctta

SEQ ID NO: 4490 - DNA, 21 bp, Homo sapiens
aacccacggcactgcattcaa

SEQ ID NO: 4491 - DNA, 21 bp, Homo sapiens
ttggatagacaccaagaacta

SEQ ID NO: 4492 - DNA, 21 bp, Homo sapiens
cagggcccgctccaaacataa

SEQ ID NO: 4493 - DNA, 21 bp, Homo sapiens
ccggtttggcaacaacaccaa

SEQ ID NO: 4494 - DNA, 21 bp, Homo sapiens
cccgctgggattcgaagtgaa

SEQ ID NO: 4495 - DNA, 21 bp, Homo sapiens
ccagtctgttgcataaataca

SEQ ID NO: 4496 - DNA, 21 bp, Homo sapiens
acccttcaagatgtgcctcaa

SEQ ID NO: 4497 - DNA, 21 bp, Homo sapiens
ctggacagtgtgcagcatcaa

SEQ ID NO: 4498 - DNA, 21 bp, Homo sapiens
cacccggaggtgaacattgaa

SEQ ID NO: 4499 - DNA, 21 bp, Homo sapiens
cacctatgatgagaaactcta

SEQ ID NO: 4500 - DNA, 21 bp, Homo sapiens
cccgatgggtttcctaaattt

SEQ ID NO: 4501 - DNA, 21 bp, Homo sapiens
ttggacttactcgcaaatgaa

SEQ ID NO: 4502 - DNA, 21 bp, Homo sapiens
ctcgaaggtggtcctactaca

SEQ ID NO: 4503 - DNA, 21 bp, Homo sapiens
ctagagcttagttgtgtttaa

SEQ ID NO: 4504 - DNA, 21 bp, Homo sapiens
ctgtagattagtgaacagaaa

SEQ ID NO: 4505 - DNA, 21 bp, Homo sapiens
aagagagatactatggactta

SEQ ID NO: 4506 - DNA, 21 bp, Homo sapiens
ctgggctcacttaatagagaa

SEQ ID NO: 4507 - DNA, 21 bp, Homo sapiens
ctggagctggcctatacttta

SEQ ID NO: 4508 - DNA, 21 bp, Homo sapiens
agggaatacctaaacttcgaa

SEQ ID NO: 4509 - DNA, 21 bp, Homo sapiens
cacatcaagctgacatatcaa

SEQ ID NO: 4510 - DNA, 21 bp, Homo sapiens
caggaggaatttcacaccgca

SEQ ID NO: 4511 - DNA, 21 bp, Homo sapiens
gagaatcctgttgttagtaaa

SEQ ID NO: 4512 - DNA, 21 bp, Homo sapiens
caagctgacatatcaagtata

SEQ ID NO: 4513 - DNA, 21 bp, Homo sapiens
aagggaagatttcatccttaa

SEQ ID NO: 4514 - DNA, 21 bp, Homo sapiens
ctgtggcatcacactcctcaa

SEQ ID NO: 4515 - DNA, 21 bp, Homo sapiens
gcggtgggcctggttaaataa

SEQ ID NO: 4516 - DNA, 21 bp, Homo sapiens
ccgcttggcgatgccagccaa

SEQ ID NO: 4517 - DNA, 21 bp, Homo sapiens
tagagcttactttgcaaagaa

SEQ ID NO: 4518 - DNA, 21 bp, Homo sapiens
tccgttagccgtggtgattta

SEQ ID NO: 4519 - DNA, 21 bp, Homo sapiens
ctgaagaaacttgtgaacgaa

SEQ ID NO: 4520 - DNA, 21 bp, Homo sapiens
taagatcaagacactcatcaa

SEQ ID NO: 4521 - DNA, 21 bp, Homo sapiens
ccgcctcgaggtcaaagccaa

SEQ ID NO: 4522 - DNA, 21 bp, Homo sapiens
tcccaagttcctgataaccaa

SEQ ID NO: 4523 - DNA, 21 bp, Homo sapiens
caaggtcaagttcgacctcaa

SEQ ID NO: 4524 - DNA, 21 bp, Homo sapiens
tagcacggagctctttgtgaa

SEQ ID NO: 4525 - DNA, 21 bp, Homo sapiens
ccgcataaaggtgtcccacat

SEQ ID NO: 4526 - DNA, 21 bp, Homo sapiens
caggatgtcggcaacacggaa

SEQ ID NO: 4527 - DNA, 21 bp, Homo sapiens
tagcagttacacagaatttca

SEQ ID NO: 4528 - DNA, 21 bp, Homo sapiens
ctcggtgcagccgtatttcta

SEQ ID NO: 4529 - DNA, 21 bp, Homo sapiens
cccaaggtagttatccttaaa

SEQ ID NO: 4530 - DNA, 21 bp, Homo sapiens
aacgtttatagcagttacaca

SEQ ID NO: 4531 - DNA, 21 bp, Homo sapiens
cagcactatttctacgactat

SEQ ID NO: 4532 - DNA, 21 bp, Homo sapiens
tggctagtgacaaataaatta

SEQ ID NO: 4533 - DNA, 21 bp, Homo sapiens
ctgtggctagtgacaaataaa

SEQ ID NO: 4534 - DNA, 21 bp, Homo sapiens
ctccagttggctttactttaa

SEQ ID NO: 4535 - DNA, 21 bp, Homo sapiens
tccggcaactggaacagacaa

SEQ ID NO: 4536 - DNA, 21 bp, Homo sapiens
ctctggcatattcatcaagta

SEQ ID NO: 4537 - DNA, 21 bp, Homo sapiens
cagagagtagctgtgtttgaa

SEQ ID NO: 4538 - DNA, 21 bp, Homo sapiens
catcctgagtttataataata

SEQ ID NO: 4539 - DNA, 21 bp, Homo sapiens
ctcgtgataacggctaaggaa

SEQ ID NO: 4540 - DNA, 21 bp, Homo sapiens
aagtgggaaagttgcatttaa

SEQ ID NO: 4541 - DNA, 21 bp, Homo sapiens
tgcgaggatcctggtattgta

SEQ ID NO: 4542 - DNA, 21 bp, Homo sapiens
tcctggtattgtaatattaaa

SEQ ID NO: 4543 - DNA, 21 bp, Homo sapiens
aagcgcatccatgaactggaa

SEQ ID NO: 4544 - DNA, 21 bp, Homo sapiens
ctgggctttacttcagatgaa

SEQ ID NO: 4545 - DNA, 21 bp, Homo sapiens
cagagagagattatcacattt

SEQ ID NO: 4546 - DNA, 21 bp, Homo sapiens
cagacggaggaggacaggaaa

SEQ ID NO: 4547 - DNA, 21 bp, Homo sapiens
ctcgttcatcgcatcaataaa

SEQ ID NO: 4548 - DNA, 21 bp, Homo sapiens
aagcggttcaaagcaaatcta

SEQ ID NO: 4549 - DNA, 21 bp, Homo sapiens
cccatgttgcttcttcacata

SEQ ID NO: 4550 - DNA, 21 bp, Homo sapiens
caggactaatctatacttatt

SEQ ID NO: 4551 - DNA, 21 bp, Homo sapiens
caaggaggcattcacactcat

SEQ ID NO: 4552 - DNA, 21 bp, Homo sapiens
ctcatccaatgtcttctccaa

SEQ ID NO: 4553 - DNA, 21 bp, Homo sapiens
cccattcaagaaccgctataa

SEQ ID NO: 4554 - DNA, 21 bp, Homo sapiens
ggcgtagacaatttcatataa

SEQ ID NO: 4555 - DNA, 21 bp, Homo sapiens
cagcatttatgggatgtttaa

SEQ ID NO: 4556 - DNA, 21 bp, Homo sapiens
cagcatcgaatataagtaaga

SEQ ID NO: 4557 - DNA, 21 bp, Homo sapiens
ccgcctgagcaaagtaaatga

SEQ ID NO: 4558 - DNA, 21 bp, Homo sapiens
ccgcctgagcaaagtaaatga

SEQ ID NO: 4559 - DNA, 21 bp, Homo sapiens
ctgcacgtcgagcaatccaaa

SEQ ID NO: 4560 - DNA, 21 bp, Homo sapiens
tacagggaatttgtacgttta

SEQ ID NO: 4561 - DNA, 21 bp, Homo sapiens
caggctcaagaaggtgaatga

SEQ ID NO: 4562 - DNA, 21 bp, Homo sapiens
cccagatgaaaccatgcccaa

SEQ ID NO: 4563 - DNA, 21 bp, Homo sapiens
ccaactgagattgtcttccaa

SEQ ID NO: 4564 - DNA, 21 bp, Homo sapiens
ctgccctgaattgagagagaa

SEQ ID NO: 4565 - DNA, 21 bp, Homo sapiens
tggcatcttgttgacatcgaa

SEQ ID NO: 4566 - DNA, 21 bp, Homo sapiens
cccacccagtatcctaaataa

SEQ ID NO: 4567 - DNA, 21 bp, Homo sapiens
cccgcaggaatgggaatggaa

SEQ ID NO: 4568 - DNA, 21 bp, Homo sapiens
ccggatgatgaatggcatgaa

SEQ ID NO: 4569 - DNA, 21 bp, Homo sapiens
atcctcaatctaagtacttaa

SEQ ID NO: 4570 - DNA, 21 bp, Homo sapiens
ctcaatctaagtacttaacta

SEQ ID NO: 4571 - DNA, 21 bp, Homo sapiens
tcgaaattcatgatactacta

SEQ ID NO: 4572 - DNA, 21 bp, Homo sapiens
cgtggtgaactttgtgaatta

SEQ ID NO: 4573 - DNA, 21 bp, Homo sapiens
ccgattcatagtcctgtccaa

SEQ ID NO: 4574 - DNA, 21 bp, Homo sapiens
tccatgtaccttgaagtgcaa

SEQ ID NO: 4575 - DNA, 21 bp, Homo sapiens
ccgaaacaacgtacgccgtaa

SEQ ID NO: 4576 - DNA, 21 bp, Homo sapiens
cagcgcggcctccgagttcaa

SEQ ID NO: 4577 - DNA, 21 bp, Homo sapiens
caggtatggactgctgataaa

SEQ ID NO: 4578 - DNA, 21 bp, Homo sapiens
ctggaagaagctaaagagaaa

SEQ ID NO: 4579 - DNA, 21 bp, Homo sapiens
cagaagcattaaccgagacaa

SEQ ID NO: 4580 - DNA, 21 bp, Homo sapiens
caagaaggattacctaggcaa

SEQ ID NO: 4581 - DNA, 21 bp, Homo sapiens
caagtacacggtagtcatgaa

SEQ ID NO: 4582 - DNA, 21 bp, Homo sapiens
cagtttggaagtgttaactat

SEQ ID NO: 4583 - DNA, 21 bp, Homo sapiens
acggtgaaattgatggaaata

SEQ ID NO: 4584 - DNA, 21 bp, Homo sapiens
tccgtctagttaacatttcaa

SEQ ID NO: 4585 - DNA, 21 bp, Homo sapiens
ttgactggatattcatataaa

SEQ ID NO: 4586 - DNA, 21 bp, Homo sapiens
atccgtctagttaacatttca

SEQ ID NO: 4587 - DNA, 21 bp, Homo sapiens
ccgcgaaatcaccaagatgca

SEQ ID NO: 4588 - DNA, 21 bp, Homo sapiens
cagtgcagtattcacgtgtaa

SEQ ID NO: 4589 - DNA, 21 bp, Homo sapiens
cccaccgtgagtcaactttaa

SEQ ID NO: 4590 - DNA, 21 bp, Homo sapiens
ccaccgtgagtcaactttaaa

SEQ ID NO: 4591 - DNA, 21 bp, Homo sapiens
cagcctggagtggctgaagaa

SEQ ID NO: 4592 - DNA, 21 bp, Homo sapiens
caagtactccgtcatgatcaa

SEQ ID NO: 4593 - DNA, 21 bp, Homo sapiens
tccggaagccattatcgtaaa

SEQ ID NO: 4594 - DNA, 21 bp, Homo sapiens
aagagaggatagattccttaa

SEQ ID NO: 4595 - DNA, 21 bp, Homo sapiens
aagcaggacaatcgcacttta

SEQ ID NO: 4596 - DNA, 21 bp, Homo sapiens
ctggatgtttggaacccttta

SEQ ID NO: 4597 - DNA, 21 bp, Homo sapiens
cagattgaggatgcacatata

SEQ ID NO: 4598 - DNA, 21 bp, Homo sapiens
cagaatattagtaaagattta

SEQ ID NO: 4599 - DNA, 21 bp, Homo sapiens
cagcagaactgtatcaaggaa

SEQ ID NO: 4600 - DNA, 21 bp, Homo sapiens
atgactgttgctgaaatataa

SEQ ID NO: 4601 - DNA, 21 bp, Homo sapiens
ctcatcaaacaacacaatgaa

SEQ ID NO: 4602 - DNA, 21 bp, Homo sapiens
caccatctgttgagttgtaaa

SEQ ID NO: 4603 - DNA, 21 bp, Homo sapiens
ctgtaggtattaagtcattaa

SEQ ID NO: 4604 - DNA, 21 bp, Homo sapiens
ctggtctatatgtgatttcaa

SEQ ID NO: 4605 - DNA, 21 bp, Homo sapiens
ccgcagataattaatggacaa

SEQ ID NO: 4606 - DNA, 21 bp, Homo sapiens
ttggcttatcttcataaataa

SEQ ID NO: 4607 - DNA, 21 bp, Homo sapiens
ccggagagtctcaagcttgaa

SEQ ID NO: 4608 - DNA, 21 bp, Homo sapiens
ttgagtgtccgtgtaaataaa

SEQ ID NO: 4609 - DNA, 21 bp, Homo sapiens
cagcgcctatattaaggcaca

SEQ ID NO: 4610 - DNA, 21 bp, Homo sapiens
cacatttgaataaattctatt

SEQ ID NO: 4611 - DNA, 21 bp, Homo sapiens
cgctgccgaaatgaagtataa

SEQ ID NO: 4612 - DNA, 21 bp, Homo sapiens
cacccaagaacaagaggtata

SEQ ID NO: 4613 - DNA, 21 bp, Homo sapiens
cccaatcacaatatccagtaa

SEQ ID NO: 4614 - DNA, 21 bp, Homo sapiens
cagcagtacttgctcaataaa

SEQ ID NO: 4615 - DNA, 21 bp, Homo sapiens
tgcgagaaagatattgatgaa

SEQ ID NO: 4616 - DNA, 21 bp, Homo sapiens
ctcatgtgagtgagaaattaa

SEQ ID NO: 4617 - DNA, 21 bp, Homo sapiens
atggctctctctacatagtaa

SEQ ID NO: 4618 - DNA, 21 bp, Homo sapiens
cagaataaagctcgagccgaa

SEQ ID NO: 4619 - DNA, 21 bp, Homo sapiens
tagggatagaccatcagtcaa

SEQ ID NO: 4620 - DNA, 21 bp, Homo sapiens
accgtaggagatgttcgtcaa

SEQ ID NO: 4621 - DNA, 21 bp, Homo sapiens
cacgaatttggtgtggctgta

SEQ ID NO: 4622 - DNA, 21 bp, Homo sapiens
cagatcgtattaattatctga

SEQ ID NO: 4623 - DNA, 21 bp, Homo sapiens
caagcttgtatatacatatta

SEQ ID NO: 4624 - DNA, 21 bp, Homo sapiens
cccatggtgggttgtcatata

SEQ ID NO: 4625 - DNA, 21 bp, Homo sapiens
caatggcaacttctcactcaa

SEQ ID NO: 4626 - DNA, 21 bp, Homo sapiens
cccgctctgtctcaatggcaa

SEQ ID NO: 4627 - DNA, 21 bp, Homo sapiens
ctcggagaatctcttgtctta

SEQ ID NO: 4628 - DNA, 21 bp, Homo sapiens
caagacaatttgtaactagaa

SEQ ID NO: 4629 - DNA, 21 bp, Homo sapiens
cccaggctgttgggaacgtaa

SEQ ID NO: 4630 - DNA, 21 bp, Homo sapiens
ccggctgacaatacaatgaaa

SEQ ID NO: 4631 - DNA, 21 bp, Homo sapiens
cagggctggagagtactttaa

SEQ ID NO: 4632 - DNA, 21 bp, Homo sapiens
cagacgcttcatgtaaataaa

SEQ ID NO: 4633 - DNA, 21 bp, Homo sapiens
aagggtagagtgaacaggaaa

SEQ ID NO: 4634 - DNA, 21 bp, Homo sapiens
aaggagattcccaatattcaa

SEQ ID NO: 4635 - DNA, 21 bp, Homo sapiens
ctggacaatcaggaagtccaa

SEQ ID NO: 4636 - DNA, 21 bp, Homo sapiens
tacaatcactaattcccttaa

SEQ ID NO: 4637 - DNA, 21 bp, Homo sapiens
aaggttaaactgtaatgacat

SEQ ID NO: 4638 - DNA, 21 bp, Homo sapiens
acagagggcaagtgcaattta

SEQ ID NO: 4639 - DNA, 21 bp, Homo sapiens
ctggtgcttcttacattataa

SEQ ID NO: 4640 - DNA, 21 bp, Homo sapiens
ccggacaatcagatagttcaa

SEQ ID NO: 4641 - DNA, 21 bp, Homo sapiens
cccatccgggttcgagttcaa

SEQ ID NO: 4642 - DNA, 21 bp, Homo sapiens
cgggagctcagtgtagctgaa

SEQ ID NO: 4643 - DNA, 21 bp, Homo sapiens
atggcaattctttgacctcaa

SEQ ID NO: 4644 - DNA, 21 bp, Homo sapiens
ctcctgaaacttacacacaaa

SEQ ID NO: 4645 - DNA, 21 bp, Homo sapiens
acgttaagtgatgaacattaa

SEQ ID NO: 4646 - DNA, 21 bp, Homo sapiens
aacgttaagtgatgaacatta

SEQ ID NO: 4647 - DNA, 21 bp, Homo sapiens
caggacattccagaaggacaa

SEQ ID NO: 4648 - DNA, 21 bp, Homo sapiens
cacgctctttgtcaggctcaa

SEQ ID NO: 4649 - DNA, 21 bp, Homo sapiens
aaccttgtgagcagaaggcaa

SEQ ID NO: 4650 - DNA, 21 bp, Homo sapiens
ctccttctctctgagattcaa

SEQ ID NO: 4651 - DNA, 21 bp, Homo sapiens
acgctataagactaagcgaaa

SEQ ID NO: 4652 - DNA, 21 bp, Homo sapiens
caggctatcatatatactgta

SEQ ID NO: 4653 - DNA, 21 bp, Homo sapiens
aactgtgtttattgcctataa

SEQ ID NO: 4654 - DNA, 21 bp, Homo sapiens
ccggagtactagccagcacaa

SEQ ID NO: 4655 - DNA, 21 bp, Homo sapiens
cccgctgtaccctgccgcgta

SEQ ID NO: 4656 - DNA, 21 bp, Homo sapiens
ctggagaagactttcgaacaa

SEQ ID NO: 4657 - DNA, 21 bp, Homo sapiens
ccggcagatgcgcgtcacaga

SEQ ID NO: 4658 - DNA, 21 bp, Homo sapiens
acggccgccttgtcaagtata

SEQ ID NO: 4659 - DNA, 21 bp, Homo sapiens
ctgcatcgaggttggcaagaa

SEQ ID NO: 4660 - DNA, 21 bp, Homo sapiens
acgcaccttcctggccgtgaa

SEQ ID NO: 4661 - DNA, 21 bp, Homo sapiens
acgcctttatgcaagttgtaa

SEQ ID NO: 4662 - DNA, 21 bp, Homo sapiens
ttgtaaggagttgaacagtaa

SEQ ID NO: 4663 - DNA, 21 bp, Homo sapiens
cagcacatgggtggtacacta

SEQ ID NO: 4664 - DNA, 21 bp, Homo sapiens
accaactacctccgtcagcaa

SEQ ID NO: 4665 - DNA, 21 bp, Homo sapiens
gtgctcctagatcaccataaa

SEQ ID NO: 4666 - DNA, 21 bp, Homo sapiens
ctggatgttctctttactgaa

SEQ ID NO: 4667 - DNA, 21 bp, Homo sapiens
aagattaaggatcactgtata

SEQ ID NO: 4668 - DNA, 21 bp, Homo sapiens
aaggatcactgtatagattaa

SEQ ID NO: 4669 - DNA, 21 bp, Homo sapiens
acggctgagggaccaaatcaa

SEQ ID NO: 4670 - DNA, 21 bp, Homo sapiens
ctcggacactgtggaattcta

SEQ ID NO: 4671 - DNA, 21 bp, Homo sapiens
taccagcatgttatagggcaa

SEQ ID NO: 4672 - DNA, 21 bp, Homo sapiens
ttagatgataatggacaacta

SEQ ID NO: 4673 - DNA, 21 bp, Homo sapiens
aagggaaggtaagatggataa

SEQ ID NO: 4674 - DNA, 21 bp, Homo sapiens
ctgactaaacgtagtaaggaa

SEQ ID NO: 4675 - DNA, 21 bp, Homo sapiens
gaggtggtcaacatccttcaa

SEQ ID NO: 4676 - DNA, 21 bp, Homo sapiens
caggtctgtgtgatatctgta

SEQ ID NO: 4677 - DNA, 21 bp, Homo sapiens
tggctttgtgttcgccttgaa

SEQ ID NO: 4678 - DNA, 21 bp, Homo sapiens
cgccttgaaccaggaaggaaa

SEQ ID NO: 4679 - DNA, 21 bp, Homo sapiens
cagcgtcttcgactacattca

SEQ ID NO: 4680 - DNA, 21 bp, Homo sapiens
gcccgtagccctgagaattaa

SEQ ID NO: 4681 - DNA, 21 bp, Homo sapiens
caaggcctcattcaccgtgaa

SEQ ID NO: 4682 - DNA, 21 bp, Homo sapiens
cagcagcaatccgccggtcaa

SEQ ID NO: 4683 - DNA, 21 bp, Homo sapiens
tcggaccaaaccaacattcaa

SEQ ID NO: 4684 - DNA, 21 bp, Homo sapiens
ctggttaggtgagctccataa

SEQ ID NO: 4685 - DNA, 21 bp, Homo sapiens
cacctgcttctgattccacaa

SEQ ID NO: 4686 - DNA, 21 bp, Homo sapiens
ctgaggcggcattaagaggaa

SEQ ID NO: 4687 - DNA, 21 bp, Homo sapiens
aagatggtttcttacctttga

SEQ ID NO: 4688 - DNA, 21 bp, Homo sapiens
tccacggtgaaataaagtcaa

SEQ ID NO: 4689 - DNA, 21 bp, Homo sapiens
caagggctgcttcggcctcaa

SEQ ID NO: 4690 - DNA, 21 bp, Homo sapiens
cccaacgcgcgcaaatacaaa

SEQ ID NO: 4691 - DNA, 21 bp, Homo sapiens
ccggtactcactcaccaatga

SEQ ID NO: 4692 - DNA, 21 bp, Homo sapiens
cctgacgttgcgcaaatttaa

SEQ ID NO: 4693 - DNA, 21 bp, Homo sapiens
acgcattgagctgacacgaaa

SEQ ID NO: 4694 - DNA, 21 bp, Homo sapiens
aacgcattgagctgacacgaa

SEQ ID NO: 4695 - DNA, 21 bp, Homo sapiens
cccgggaggatggacttcgaa

SEQ ID NO: 4696 - DNA, 21 bp, Homo sapiens
acccaactgaatgaagagcta

SEQ ID NO: 4697 - DNA, 21 bp, Homo sapiens
caggacaatcgcacccgggaa

SEQ ID NO: 4698 - DNA, 21 bp, Homo sapiens
aaggatgccctagatgagcta

SEQ ID NO: 4699 - DNA, 21 bp, Homo sapiens
ttcgattaaagtgcactgaaa

SEQ ID NO: 4700 - DNA, 21 bp, Homo sapiens
ctggactgtcttcatcaagta

SEQ ID NO: 4701 - DNA, 21 bp, Homo sapiens
cccttagtttgtcttactgta

SEQ ID NO: 4702 - DNA, 21 bp, Homo sapiens
taggcatttcaagttggtgta

SEQ ID NO: 4703 - DNA, 21 bp, Homo sapiens
ttgggctctatacatttgtaa

SEQ ID NO: 4704 - DNA, 21 bp, Homo sapiens
cacagtcttgtggaacttcaa

SEQ ID NO: 4705 - DNA, 21 bp, Homo sapiens
caggcagatgaatgtcttgaa

SEQ ID NO: 4706 - DNA, 21 bp, Homo sapiens
cagaggtgcaatcaaatggaa

SEQ ID NO: 4707 - DNA, 21 bp, Homo sapiens
ccgaatttagatgctggtcat

SEQ ID NO: 4708 - DNA, 21 bp, Homo sapiens
caagatttcaatatccaacaa

SEQ ID NO: 4709 - DNA, 21 bp, Homo sapiens
atccaacaactagatagatta

SEQ ID NO: 4710 - DNA, 21 bp, Homo sapiens
ctagatagattaggacctcta

SEQ ID NO: 4711 - DNA, 21 bp, Homo sapiens
aaggaatgcaataaagagtaa

SEQ ID NO: 4712 - DNA, 21 bp, Homo sapiens
caggtacacatttacactgaa

SEQ ID NO: 4713 - DNA, 21 bp, Homo sapiens
caggctgaggtggaccaagaa

SEQ ID NO: 4714 - DNA, 21 bp, Homo sapiens
gagcaaggtgaaatacatcaa

SEQ ID NO: 4715 - DNA, 21 bp, Homo sapiens
ctggaggagcaaggtgaaata

SEQ ID NO: 4716 - DNA, 21 bp, Homo sapiens
cacgctgggcaagctcatcta

SEQ ID NO: 4717 - DNA, 21 bp, Homo sapiens
ctgcatagacaaaggccttaa

SEQ ID NO: 4718 - DNA, 21 bp, Homo sapiens
atggcttaagcctgtgtataa

SEQ ID NO: 4719 - DNA, 21 bp, Homo sapiens
ctgacgagtttgtctaggaaa

SEQ ID NO: 4720 - DNA, 21 bp, Homo sapiens
accacgaacagaagtaatgaa

SEQ ID NO: 4721 - DNA, 21 bp, Homo sapiens
cgcgatggtttcagacgctga

SEQ ID NO: 4722 - DNA, 21 bp, Homo sapiens
cagagagcacggataacttta

SEQ ID NO: 4723 - DNA, 21 bp, Homo sapiens
ctggttggagcgaatctgcta

SEQ ID NO: 4724 - DNA, 21 bp, Homo sapiens
cacggataactttatcttgtt

SEQ ID NO: 4725 - DNA, 21 bp, Homo sapiens
cagcaatggatggaatttcaa

SEQ ID NO: 4726 - DNA, 21 bp, Homo sapiens
cccaatattgtctgccttcta

SEQ ID NO: 4727 - DNA, 21 bp, Homo sapiens
ccgtactgcgatgaaacttca

SEQ ID NO: 4728 - DNA, 21 bp, Homo sapiens
cccagtgagtaatctcagtaa

SEQ ID NO: 4729 - DNA, 21 bp, Homo sapiens
cgggatttctttgtaaagcat

SEQ ID NO: 4730 - DNA, 21 bp, Homo sapiens
ctggagttagcactaacataa

SEQ ID NO: 4731 - DNA, 21 bp, Homo sapiens
cagtgtattactgctatgaaa

SEQ ID NO: 4732 - DNA, 21 bp, Homo sapiens
tgggactactattaaatttaa

SEQ ID NO: 4733 - DNA, 21 bp, Homo sapiens
ctgaggctggctgtaaagtaa

SEQ ID NO: 4734 - DNA, 21 bp, Homo sapiens
ctggctgtaaagtaagtgtaa

SEQ ID NO: 4735 - DNA, 21 bp, Homo sapiens
tcggatatgaaccacacggaa

SEQ ID NO: 4736 - DNA, 21 bp, Homo sapiens
cagctagagcttcttcccgaa

SEQ ID NO: 4737 - DNA, 21 bp, Homo sapiens
ccgcggaagtgtagaaaccca

SEQ ID NO: 4738 - DNA, 21 bp, Homo sapiens
ctggctgtgattggcgataga

SEQ ID NO: 4739 - DNA, 21 bp, Homo sapiens
tggaatagaccttgacactaa

SEQ ID NO: 4740 - DNA, 21 bp, Homo sapiens
gaccttgacactaacactcta

SEQ ID NO: 4741 - DNA, 21 bp, Homo sapiens
caggatcaatcgtgtcaccga

SEQ ID NO: 4742 - DNA, 21 bp, Homo sapiens
ctgcaattgggttgttgtcaa

SEQ ID NO: 4743 - DNA, 21 bp, Homo sapiens
cactctttctttctcctttaa

SEQ ID NO: 4744 - DNA, 21 bp, Homo sapiens
ttggcttgacccataaactaa

SEQ ID NO: 4745 - DNA, 21 bp, Homo sapiens
aaggaggactcggatgccata

SEQ ID NO: 4746 - DNA, 21 bp, Homo sapiens
ccgggcaaggtcaccatcaca

SEQ ID NO: 4747 - DNA, 21 bp, Homo sapiens
ctcggatgccatagattggaa

SEQ ID NO: 4748 - DNA, 21 bp, Homo sapiens
ctggaatgtcgtgctggacaa

SEQ ID NO: 4749 - DNA, 21 bp, Homo sapiens
cacgtgtaggataatcattca

SEQ ID NO: 4750 - DNA, 21 bp, Homo sapiens
atgcatgaaacccaacactaa

SEQ ID NO: 4751 - DNA, 21 bp, Homo sapiens
taggccaaagtagcaagctaa

SEQ ID NO: 4752 - DNA, 21 bp, Homo sapiens
ctgggacactatcctactata

SEQ ID NO: 4753 - DNA, 21 bp, Homo sapiens
cacgctcaccatgatgagtgt

SEQ ID NO: 4754 - DNA, 21 bp, Homo sapiens
ctccatcgactactacaatat

SEQ ID NO: 4755 - DNA, 21 bp, Homo sapiens
cggcatcgtccggtacactaa

SEQ ID NO: 4756 - DNA, 21 bp, Homo sapiens
cagcatcttcacgctcaccat

SEQ ID NO: 4757 - DNA, 21 bp, Homo sapiens
cagggaagacgtcgatgtcat

SEQ ID NO: 4758 - DNA, 21 bp, Homo sapiens
atcgatgggatgaataaacca

SEQ ID NO: 4759 - DNA, 21 bp, Homo sapiens
taggtttaactcagatcacta

SEQ ID NO: 4760 - DNA, 21 bp, Homo sapiens
cagatgctttagttactacaa

SEQ ID NO: 4761 - DNA, 21 bp, Homo sapiens
ctgccttgtcatgtacgtcat

SEQ ID NO: 4762 - DNA, 21 bp, Homo sapiens
cagcggtgcaatgaactatca

SEQ ID NO: 4763 - DNA, 21 bp, Homo sapiens
ctggctgggtattcttcgtaa

SEQ ID NO: 4764 - DNA, 21 bp, Homo sapiens
atgggacaggtcaaagcatta

SEQ ID NO: 4765 - DNA, 21 bp, Homo sapiens
ccgtagtaacacataaagtaa

SEQ ID NO: 4766 - DNA, 21 bp, Homo sapiens
agggaagagattagcatgaaa

SEQ ID NO: 4767 - DNA, 21 bp, Homo sapiens
ttcaccgtagtaacacataaa

SEQ ID NO: 4768 - DNA, 21 bp, Homo sapiens
tccagagtgtgaattacctaa

SEQ ID NO: 4769 - DNA, 21 bp, Homo sapiens
cccactcagctgagaaagaca

SEQ ID NO: 4770 - DNA, 21 bp, Homo sapiens
ctgagaaagacactatggcta

SEQ ID NO: 4771 - DNA, 21 bp, Homo sapiens
cagcaccatcattgctgtgta

SEQ ID NO: 4772 - DNA, 21 bp, Homo sapiens
atgggtggttgccaacctgaa

SEQ ID NO: 4773 - DNA, 21 bp, Homo sapiens
tcagctatggtggctgcataa

SEQ ID NO: 4774 - DNA, 21 bp, Homo sapiens
cccaaatgctgatcaatttat

SEQ ID NO: 4775 - DNA, 21 bp, Homo sapiens
caagttcatttccctgttcta

SEQ ID NO: 4776 - DNA, 21 bp, Homo sapiens
aagcatcatcgtgatctccta

SEQ ID NO: 4777 - DNA, 21 bp, Homo sapiens
ctgggttcaaccaagctttca

SEQ ID NO: 4778 - DNA, 21 bp, Homo sapiens
ttcaggtatctttaactatat

SEQ ID NO: 4779 - DNA, 21 bp, Homo sapiens
caagctttcagacaaggataa

SEQ ID NO: 4780 - DNA, 21 bp, Homo sapiens
aagctttcagacaaggataaa

SEQ ID NO: 4781 - DNA, 21 bp, Homo sapiens
agggtgctctgtggcaaatat

SEQ ID NO: 4782 - DNA, 21 bp, Homo sapiens
atggacaaactccaaggcaaa

SEQ ID NO: 4783 - DNA, 21 bp, Homo sapiens
cacgtggcagctgcagttcta

SEQ ID NO: 4784 - DNA, 21 bp, Homo sapiens
aagaggtatcttcaactacat

SEQ ID NO: 4785 - DNA, 21 bp, Homo sapiens
ctgcagcaacatagagtacaa

SEQ ID NO: 4786 - DNA, 21 bp, Homo sapiens
ctcagccagtcttaaaggcaa

SEQ ID NO: 4787 - DNA, 21 bp, Homo sapiens
tcgaaacgaggagtacaataa

SEQ ID NO: 4788 - DNA, 21 bp, Homo sapiens
ttccctcacttgcatcaataa

SEQ ID NO: 4789 - DNA, 21 bp, Homo sapiens
cagcacgagaaggagaggaaa

SEQ ID NO: 4790 - DNA, 21 bp, Homo sapiens
cacgatctttctcagagagta

SEQ ID NO: 4791 - DNA, 21 bp, Homo sapiens
caaggcctggatgttcctaaa

SEQ ID NO: 4792 - DNA, 21 bp, Homo sapiens
cgggctcaggaacaacatcta

SEQ ID NO: 4793 - DNA, 21 bp, Homo sapiens
ctgacgtaaggtggatattaa

SEQ ID NO: 4794 - DNA, 21 bp, Homo sapiens
tggagggacatgactaattta

SEQ ID NO: 4795 - DNA, 21 bp, Homo sapiens
agcggtggagcttggcataaa

SEQ ID NO: 4796 - DNA, 21 bp, Homo sapiens
agggcatagaatcgtccttta

SEQ ID NO: 4797 - DNA, 21 bp, Homo sapiens
agcatccatcccaattatcaa

SEQ ID NO: 4798 - DNA, 21 bp, Homo sapiens
tacgtgcttaactttgcttaa

SEQ ID NO: 4799 - DNA, 21 bp, Homo sapiens
ctccgttacgaccaaggtcaa

SEQ ID NO: 4800 - DNA, 21 bp, Homo sapiens
aggcaggtgcgtagctttcaa

SEQ ID NO: 4801 - DNA, 21 bp, Homo sapiens
tcgtgcatttatgatgctaaa

SEQ ID NO: 4802 - DNA, 21 bp, Homo sapiens
cgggacgttgagcacaacgta

SEQ ID NO: 4803 - DNA, 21 bp, Homo sapiens
ctgggatgcaacggccaccta

SEQ ID NO: 4804 - DNA, 21 bp, Homo sapiens
cagaggtgagggaacccaata

SEQ ID NO: 4805 - DNA, 21 bp, Homo sapiens
cccaatagtgatacctggtaa

SEQ ID NO: 4806 - DNA, 21 bp, Homo sapiens
cagatagattgtaacacggga

SEQ ID NO: 4807 - DNA, 21 bp, Homo sapiens
cagagaagttagatcggctaa

SEQ ID NO: 4808 - DNA, 21 bp, Homo sapiens
tggcaacaaatgggtatccaa

SEQ ID NO: 4809 - DNA, 21 bp, Homo sapiens
cgaaatcatcatattgcataa

SEQ ID NO: 4810 - DNA, 21 bp, Homo sapiens
cagggtggtaatattggcatt

SEQ ID NO: 4811 - DNA, 21 bp, Homo sapiens
gaggaagacgatgatcagaaa

SEQ ID NO: 4812 - DNA, 21 bp, Homo sapiens
ctatttcacaatcgaattgaa

SEQ ID NO: 4813 - DNA, 21 bp, Homo sapiens
caggacggtcattgattacaa

SEQ ID NO: 4814 - DNA, 21 bp, Homo sapiens
aagatgaactgtaatacgcaa

SEQ ID NO: 4815 - DNA, 21 bp, Homo sapiens
cagcgggtaagcgagtgttta

SEQ ID NO: 4816 - DNA, 21 bp, Homo sapiens
acgggtgttgaagatcctgca

SEQ ID NO: 4817 - DNA, 21 bp, Homo sapiens
cccgaggacctgtgttcttta

SEQ ID NO: 4818 - DNA, 21 bp, Homo sapiens
gagaagtagtttggtcagcta

SEQ ID NO: 4819 - DNA, 21 bp, Homo sapiens
tgcagtagtataaatcatgaa

SEQ ID NO: 4820 - DNA, 21 bp, Homo sapiens
ccggatcatacgaaatcaatt

SEQ ID NO: 4821 - DNA, 21 bp, Homo sapiens
ccgcgaccggatcatacgaaa

SEQ ID NO: 4822 - DNA, 21 bp, Homo sapiens
acgagtaattgtgaagcataa

SEQ ID NO: 4823 - DNA, 21 bp, Homo sapiens
tgggcagttcatgaagctcta

SEQ ID NO: 4824 - DNA, 21 bp, Homo sapiens
ccgacaagaagtctccttcaa

SEQ ID NO: 4825 - DNA, 21 bp, Homo sapiens
ctggccaatgcttaaatacta

SEQ ID NO: 4826 - DNA, 21 bp, Homo sapiens
cagggagtgcttgtttgatat

SEQ ID NO: 4827 - DNA, 21 bp, Homo sapiens
acggttcaccatcaatttaaa

SEQ ID NO: 4828 - DNA, 21 bp, Homo sapiens
accgtctaatacttcctttaa

SEQ ID NO: 4829 - DNA, 21 bp, Homo sapiens
accgacgtgggttatacttaa

SEQ ID NO: 4830 - DNA, 21 bp, Homo sapiens
aaggcggtatatgacaaccaa

SEQ ID NO: 4831 - DNA, 21 bp, Homo sapiens
ctccgtttcctcatagaacaa

SEQ ID NO: 4832 - DNA, 21 bp, Homo sapiens
tacacaggtttagttgactaa

SEQ ID NO: 4833 - DNA, 21 bp, Homo sapiens
caccagcatggtagtggcaaa

SEQ ID NO: 4834 - DNA, 21 bp, Homo sapiens
aaggtggaaatggcccattta

SEQ ID NO: 4835 - DNA, 21 bp, Homo sapiens
cggataaacttcagtgattta

SEQ ID NO: 4836 - DNA, 21 bp, Homo sapiens
cagtatcacatctgaactaaa

SEQ ID NO: 4837 - DNA, 21 bp, Homo sapiens
accgtgattcacttagatcaa

SEQ ID NO: 4838 - DNA, 21 bp, Homo sapiens
caggctttaactaattatgga

SEQ ID NO: 4839 - DNA, 21 bp, Homo sapiens
caggcgctaatagatcagtta

SEQ ID NO: 4840 - DNA, 21 bp, Homo sapiens
ttggagcagtatgacaagcta

SEQ ID NO: 4841 - DNA, 21 bp, Homo sapiens
ctacaagatggcagcatcaaa

SEQ ID NO: 4842 - DNA, 21 bp, Homo sapiens
tacgtgcctttaacagataaa

SEQ ID NO: 4843 - DNA, 21 bp, Homo sapiens
tgcggatatgggacacttaaa

SEQ ID NO: 4844 - DNA, 21 bp, Homo sapiens
tacactaagggccgaagataa

SEQ ID NO: 4845 - DNA, 21 bp, Homo sapiens
atggatttagatgttgaacaa

SEQ ID NO: 4846 - DNA, 21 bp, Homo sapiens
aaggatcttaggcattcttaa

SEQ ID NO: 4847 - DNA, 21 bp, Homo sapiens
atcatctgtcaagaaattaaa

SEQ ID NO: 4848 - DNA, 21 bp, Homo sapiens
atggaattgtgagtagcttaa

SEQ ID NO: 4849 - DNA, 21 bp, Homo sapiens
ccggcggaatgagaacttgca

SEQ ID NO: 4850 - DNA, 21 bp, Homo sapiens
ccgggtataaggagcaaagga

SEQ ID NO: 4851 - DNA, 21 bp, Homo sapiens
caggttggatacggatggcat

SEQ ID NO: 4852 - DNA, 21 bp, Homo sapiens
aacccgttacttagctgtgta

SEQ ID NO: 4853 - DNA, 21 bp, Homo sapiens
ctggttggagatggccttgga

SEQ ID NO: 4854 - DNA, 21 bp, Homo sapiens
ccctgtggttctattatatta

SEQ ID NO: 4855 - DNA, 21 bp, Homo sapiens
cccattcctgaaattatttaa

SEQ ID NO: 4856 - DNA, 21 bp, Homo sapiens
atcggagagcttcgtgctaaa

SEQ ID NO: 4857 - DNA, 21 bp, Homo sapiens
cagatcatctggaccatataa

SEQ ID NO: 4858 - DNA, 21 bp, Homo sapiens
ccagatcatctggaccatata

SEQ ID NO: 4859 - DNA, 21 bp, Homo sapiens
tccgacgatgagtataccaaa

SEQ ID NO: 4860 - DNA, 21 bp, Homo sapiens
catgaatttcatcaacaacta

SEQ ID NO: 4861 - DNA, 21 bp, Homo sapiens
atcgcggagctgatctacaaa

SEQ ID NO: 4862 - DNA, 21 bp, Homo sapiens
accgctttgtacatgagaata

SEQ ID NO: 4863 - DNA, 21 bp, Homo sapiens
tacggagtattagtagcttaa

SEQ ID NO: 4864 - DNA, 21 bp, Homo sapiens
tgggatcgtaataatggcaaa

SEQ ID NO: 4865 - DNA, 21 bp, Homo sapiens
cacagagtgaacagcaaacaa

SEQ ID NO: 4866 - DNA, 21 bp, Homo sapiens
caggttatgtataccttattt

SEQ ID NO: 4867 - DNA, 21 bp, Homo sapiens
cagggctggcgggccatgtaa

SEQ ID NO: 4868 - DNA, 21 bp, Homo sapiens
ctgctgtattatacaactgta

SEQ ID NO: 4869 - DNA, 21 bp, Homo sapiens
atgggaagtcgtgtcatccta

SEQ ID NO: 4870 - DNA, 21 bp, Homo sapiens
ttcgatcttgtctccaattaa

SEQ ID NO: 4871 - DNA, 21 bp, Homo sapiens
aaggtcgtcctttctgaacaa

SEQ ID NO: 4872 - DNA, 21 bp, Homo sapiens
ctggtgggccctgacaaagaa

SEQ ID NO: 4873 - DNA, 21 bp, Homo sapiens
cacggttagatcatatctgaa

SEQ ID NO: 4874 - DNA, 21 bp, Homo sapiens
acggattgattaaatgtggaa

SEQ ID NO: 4875 - DNA, 21 bp, Homo sapiens
cagataggtgctctgatacta

SEQ ID NO: 4876 - DNA, 21 bp, Homo sapiens
tcggacgtgggaattaagcaa

SEQ ID NO: 4877 - DNA, 21 bp, Homo sapiens
cccgaacatacagcaatatga

SEQ ID NO: 4878 - DNA, 21 bp, Homo sapiens
ccgaacatacagcaatatgaa

SEQ ID NO: 4879 - DNA, 21 bp, Homo sapiens
atggacgcattcagaaggtaa

SEQ ID NO: 4880 - DNA, 21 bp, Homo sapiens
ccggagggaaggagcatttga

SEQ ID NO: 4881 - DNA, 21 bp, Homo sapiens
cgcgtggaattggaaggacta

SEQ ID NO: 4882 - DNA, 21 bp, Homo sapiens
aacggatatcctgatcctaat

SEQ ID NO: 4883 - DNA, 21 bp, Homo sapiens
ctgagccagattggccaatta

SEQ ID NO: 4884 - DNA, 21 bp, Homo sapiens
cgcaggaagcctactatttaa

SEQ ID NO: 4885 - DNA, 21 bp, Homo sapiens
cccgagactcctgtaacctta

SEQ ID NO: 4886 - DNA, 21 bp, Homo sapiens
acgcaggaagcctactattta

SEQ ID NO: 4887 - DNA, 21 bp, Homo sapiens
ccaggagagaatagaatcaaa

SEQ ID NO: 4888 - DNA, 21 bp, Homo sapiens
ctgcgtatctggacaccttta

SEQ ID NO: 4889 - DNA, 21 bp, Homo sapiens
ctggaggatgttactggccaa

SEQ ID NO: 4890 - DNA, 21 bp, Homo sapiens
acgcagtctatcatgatgcaa

SEQ ID NO: 4891 - DNA, 21 bp, Homo sapiens
gcccaccacatttgacatcta

SEQ ID NO: 4892 - DNA, 21 bp, Homo sapiens
ctgaagccaactgtgaataaa

SEQ ID NO: 4893 - DNA, 21 bp, Homo sapiens
cacgctgctcatgaccggcaa

SEQ ID NO: 4894 - DNA, 21 bp, Homo sapiens
ccgggaaattgtcttctacaa

SEQ ID NO: 4895 - DNA, 21 bp, Homo sapiens
caggacactttacgggatcaa

SEQ ID NO: 4896 - DNA, 21 bp, Homo sapiens
ctagacagtgacatttcttaa

SEQ ID NO: 4897 - DNA, 21 bp, Homo sapiens
aggcctcttgttcacatcaaa

SEQ ID NO: 4898 - DNA, 21 bp, Homo sapiens
acccgtgtcaattaacattta

SEQ ID NO: 4899 - DNA, 21 bp, Homo sapiens
aaggatgaccctgatgacaaa

SEQ ID NO: 4900 - DNA, 21 bp, Homo sapiens
ccggatgtcatcataggagaa

SEQ ID NO: 4901 - DNA, 21 bp, Homo sapiens
caccgtggagccgggcatcta

SEQ ID NO: 4902 - DNA, 21 bp, Homo sapiens
caggctgtgacaaggccttta

SEQ ID NO: 4903 - DNA, 21 bp, Homo sapiens
tcggcatttgatcagaccaaa

SEQ ID NO: 4904 - DNA, 21 bp, Homo sapiens
ctgtcctttagtagcaagtaa

SEQ ID NO: 4905 - DNA, 21 bp, Homo sapiens
cagtagcaagtttatggacta

SEQ ID NO: 4906 - DNA, 21 bp, Homo sapiens
cagagtatatccaccagagaa

SEQ ID NO: 4907 - DNA, 21 bp, Homo sapiens
ctcatggatactatccagtta

SEQ ID NO: 4908 - DNA, 21 bp, Homo sapiens
aaggcagataccggagccaaa

SEQ ID NO: 4909 - DNA, 21 bp, Homo sapiens
ccagagagttacacatcgaaa

SEQ ID NO: 4910 - DNA, 21 bp, Homo sapiens
cacacgcaaattcaagctaga

SEQ ID NO: 4911 - DNA, 21 bp, Homo sapiens
ccagagctcattaacatgtat

SEQ ID NO: 4912 - DNA, 21 bp, Homo sapiens
caggatgtgtttgtgattgga

SEQ ID NO: 4913 - DNA, 21 bp, Homo sapiens
cgggctgtggaaccctactaa

SEQ ID NO: 4914 - DNA, 21 bp, Homo sapiens
caggaggtgtatagtgttgat

SEQ ID NO: 4915 - DNA, 21 bp, Homo sapiens
aagcctgactctcttcttgaa

SEQ ID NO: 4916 - DNA, 21 bp, Homo sapiens
taggttatacgtatatagata

SEQ ID NO: 4917 - DNA, 21 bp, Homo sapiens
acaggccgtcatggaaatgat

SEQ ID NO: 4918 - DNA, 21 bp, Homo sapiens
caacatggcgcagtctattaa

SEQ ID NO: 4919 - DNA, 21 bp, Homo sapiens
ctggatatctttgcaaatgaa

SEQ ID NO: 4920 - DNA, 21 bp, Homo sapiens
ctggttcttggttgaatgaaa

SEQ ID NO: 4921 - DNA, 21 bp, Homo sapiens
cagaacaacaacagctatgaa

SEQ ID NO: 4922 - DNA, 21 bp, Homo sapiens
gcccttgtcactaatcaccaa

SEQ ID NO: 4923 - DNA, 21 bp, Homo sapiens
ccgtgacaagccaactaacaa

SEQ ID NO: 4924 - DNA, 21 bp, Homo sapiens
ccagagcaagatagtctacta

SEQ ID NO: 4925 - DNA, 21 bp, Homo sapiens
ctcctagttgctgaaagttaa

SEQ ID NO: 4926 - DNA, 21 bp, Homo sapiens
ctgggatataaagctatgcta

SEQ ID NO: 4927 - DNA, 21 bp, Homo sapiens
ctccaatatcatggaagttaa

SEQ ID NO: 4928 - DNA, 21 bp, Homo sapiens
cagggacttgtcgctgatcaa

SEQ ID NO: 4929 - DNA, 21 bp, Homo sapiens
cccacgggaattgacacagaa

SEQ ID NO: 4930 - DNA, 21 bp, Homo sapiens
tacgaggaaattcaggataat

SEQ ID NO: 4931 - DNA, 21 bp, Homo sapiens
cagaaagtgtctggacttgta

SEQ ID NO: 4932 - DNA, 21 bp, Homo sapiens
acggagagcgaccatctttaa

SEQ ID NO: 4933 - DNA, 21 bp, Homo sapiens
tcggagaaccgtgcccggaaa

SEQ ID NO: 4934 - DNA, 21 bp, Homo sapiens
tgcgggcaacctgaacaccta

SEQ ID NO: 4935 - DNA, 21 bp, Homo sapiens
ccgcctgaaggctgcttgcaa

SEQ ID NO: 4936 - DNA, 21 bp, Homo sapiens
cagcactttatgcacgtatta

SEQ ID NO: 4937 - DNA, 21 bp, Homo sapiens
tcaacaagaaatgttatgaaa

SEQ ID NO: 4938 - DNA, 21 bp, Homo sapiens
ccacggtggtttgatcaacaa

SEQ ID NO: 4939 - DNA, 21 bp, Homo sapiens
tagcatggatcttcgtaccaa

SEQ ID NO: 4940 - DNA, 21 bp, Homo sapiens
cgggtggaacgcctacatcga

SEQ ID NO: 4941 - DNA, 21 bp, Homo sapiens
caggctctgcacagtcaagca

SEQ ID NO: 4942 - DNA, 21 bp, Homo sapiens
aagagctgcctggatgagaaa

SEQ ID NO: 4943 - DNA, 21 bp, Homo sapiens
tgccctctatttattagccaa

SEQ ID NO: 4944 - DNA, 21 bp, Homo sapiens
acccggctcgtgtatttatta

SEQ ID NO: 4945 - DNA, 21 bp, Homo sapiens
caggtacagtttacactacaa

SEQ ID NO: 4946 - DNA, 21 bp, Homo sapiens
cagcaagacaattgaagaata

SEQ ID NO: 4947 - DNA, 21 bp, Homo sapiens
gaggtcggaatggatcttgaa

SEQ ID NO: 4948 - DNA, 21 bp, Homo sapiens
gacagaaagcttagtaccaaa

SEQ ID NO: 4949 - DNA, 21 bp, Homo sapiens
cacggaaggcctaatgccgaa

SEQ ID NO: 4950 - DNA, 21 bp, Homo sapiens
atcgagtcactgcctaataaa

SEQ ID NO: 4951 - DNA, 21 bp, Homo sapiens
ctggatttgtttctcaggcaa

SEQ ID NO: 4952 - DNA, 21 bp, Homo sapiens
aagatgaatcttcaactttaa

SEQ ID NO: 4953 - DNA, 21 bp, Homo sapiens
ctggtgaaatcgatcccttaa

SEQ ID NO: 4954 - DNA, 21 bp, Homo sapiens
caccacatcgttctacacata

SEQ ID NO: 4955 - DNA, 21 bp, Homo sapiens
ccggattcttagtcacatata

SEQ ID NO: 4956 - DNA, 21 bp, Homo sapiens
ccgcctaacaaggtagatgaa

SEQ ID NO: 4957 - DNA, 21 bp, Homo sapiens
aaggctgacactcacgatgaa

SEQ ID NO: 4958 - DNA, 21 bp, Homo sapiens
tacgtggagaagggtactcaa

SEQ ID NO: 4959 - DNA, 21 bp, Homo sapiens
cacccacgatatcatcaccaa

SEQ ID NO: 4960 - DNA, 21 bp, Homo sapiens
cccgaggtcaagttcaacaaa

SEQ ID NO: 4961 - DNA, 21 bp, Homo sapiens
ctcaatcaaggcggacgtgaa

SEQ ID NO: 4962 - DNA, 21 bp, Homo sapiens
agggcaaaccctatagagtaa

SEQ ID NO: 4963 - DNA, 21 bp, Homo sapiens
accactgagtcctctaactaa

SEQ ID NO: 4964 - DNA, 21 bp, Homo sapiens
ttagacagtttgagtaattaa

SEQ ID NO: 4965 - DNA, 21 bp, Homo sapiens
caccatgaaagataacgatat

SEQ ID NO: 4966 - DNA, 21 bp, Homo sapiens
aagaagttcattatcacacaa

SEQ ID NO: 4967 - DNA, 21 bp, Homo sapiens
caggaagaaatgtcctacaaa

SEQ ID NO: 4968 - DNA, 21 bp, Homo sapiens
caggtttactttgttgatgtt

SEQ ID NO: 4969 - DNA, 21 bp, Homo sapiens
ctggtgtgtggtaacattcat

SEQ ID NO: 4970 - DNA, 21 bp, Homo sapiens
ccgggcctctgaatcacataa

SEQ ID NO: 4971 - DNA, 21 bp, Homo sapiens
cccgtagaaatgataactcca

SEQ ID NO: 4972 - DNA, 21 bp, Homo sapiens
ccagatcaagaaattcgtaaa

SEQ ID NO: 4973 - DNA, 21 bp, Homo sapiens
acggctgaatatgaatagata

SEQ ID NO: 4974 - DNA, 21 bp, Homo sapiens
cacccagtgtagcatcctaaa

SEQ ID NO: 4975 - DNA, 21 bp, Homo sapiens
tagctggttatgaactagtaa

SEQ ID NO: 4976 - DNA, 21 bp, Homo sapiens
cagcattaaaccagaccttat

SEQ ID NO: 4977 - DNA, 21 bp, Homo sapiens
cagggccagactcaagagaaa

SEQ ID NO: 4978 - DNA, 21 bp, Homo sapiens
cggcgtgagggcaacgagaaa

SEQ ID NO: 4979 - DNA, 21 bp, Homo sapiens
ttggtacgtgggcaagatcaa

SEQ ID NO: 4980 - DNA, 21 bp, Homo sapiens
ccgcgagtatgaccagcttta

SEQ ID NO: 4981 - DNA, 21 bp, Homo sapiens
tggcgacatgttcaactacta

SEQ ID NO: 4982 - DNA, 21 bp, Homo sapiens
cgacatgttcaactactataa

SEQ ID NO: 4983 - DNA, 21 bp, Homo sapiens
tcggctgatagtggcatgatt

SEQ ID NO: 4984 - DNA, 21 bp, Homo sapiens
ccgagagtattgataattcat

SEQ ID NO: 4985 - DNA, 21 bp, Homo sapiens
cggctacatccagaagatcaa

SEQ ID NO: 4986 - DNA, 21 bp, Homo sapiens
caggccgagtgtactacttca

SEQ ID NO: 4987 - DNA, 21 bp, Homo sapiens
gaccgccagattctcccttaa

SEQ ID NO: 4988 - DNA, 21 bp, Homo sapiens
cagtatttattgttcccacaa

SEQ ID NO: 4989 - DNA, 21 bp, Homo sapiens
cacactattcacacaactgaa

SEQ ID NO: 4990 - DNA, 21 bp, Homo sapiens
cagcatttgccttgcctgtaa

SEQ ID NO: 4991 - DNA, 21 bp, Homo sapiens
ccgcgtgaacagggcgcatta

SEQ ID NO: 4992 - DNA, 21 bp, Homo sapiens
ccgagccatttaccacccata

SEQ ID NO: 4993 - DNA, 21 bp, Homo sapiens
ctgggtctcagccacgtacaa

SEQ ID NO: 4994 - DNA, 21 bp, Homo sapiens
cccgtccattgtgggtagcaa

SEQ ID NO: 4995 - DNA, 21 bp, Homo sapiens
ctgaaagtctgtgtccaatta

SEQ ID NO: 4996 - DNA, 21 bp, Homo sapiens
aagcatgtcgatccaggagaa

SEQ ID NO: 4997 - DNA, 21 bp, Homo sapiens
gaggcctatctgagactataa

SEQ ID NO: 4998 - DNA, 21 bp, Homo sapiens
cgggtgcaatttggcattgaa

SEQ ID NO: 4999 - DNA, 21 bp, Homo sapiens
ttgcagctagatataaattat

SEQ ID NO: 5000 - DNA, 21 bp, Homo sapiens
ctgatgagtattgaagtacta

SEQ ID NO: 5001 - DNA, 21 bp, Homo sapiens
cacgagatagctgtactttca

SEQ ID NO: 5002 - DNA, 21 bp, Homo sapiens
caccggcatattggaagtgta

SEQ ID NO: 5003 - DNA, 21 bp, Homo sapiens
ctggataacgcctacatggaa

SEQ ID NO: 5004 - DNA, 21 bp, Homo sapiens
ccgggtgaactttgccatgaa

SEQ ID NO: 5005 - DNA, 21 bp, Homo sapiens
cccgatcagtggagacgttga

SEQ ID NO: 5006 - DNA, 21 bp, Homo sapiens
aacatcaagattatcagcaaa

SEQ ID NO: 5007 - DNA, 21 bp, Homo sapiens
caggatgaatctgccaagcaa

SEQ ID NO: 5008 - DNA, 21 bp, Homo sapiens
aagcataaccacaaactgcaa

SEQ ID NO: 5009 - DNA, 21 bp, Homo sapiens
tcccgagggccttatgagaaa

SEQ ID NO: 5010 - DNA, 21 bp, Homo sapiens
ctggtgttagagaggaattaa

SEQ ID NO: 5011 - DNA, 21 bp, Homo sapiens
caggagatactttacctataa

SEQ ID NO: 5012 - DNA, 21 bp, Homo sapiens
cagaatggaaatgacaagaaa

SEQ ID NO: 5013 - DNA, 21 bp, Homo sapiens
aagggtcagttgggacattaa

SEQ ID NO: 5014 - DNA, 21 bp, Homo sapiens
aaccaacataatcttcttaaa

SEQ ID NO: 5015 - DNA, 21 bp, Homo sapiens
cagcattgtgattagaatgaa

SEQ ID NO: 5016 - DNA, 21 bp, Homo sapiens
caggaacatatttgcatgtta

SEQ ID NO: 5017 - DNA, 21 bp, Homo sapiens
aaggatatttatgtaataaga

SEQ ID NO: 5018 - DNA, 21 bp, Homo sapiens
tccagattatttaaagagaaa

SEQ ID NO: 5019 - DNA, 21 bp, Homo sapiens
ctgcctgccctcgatgtataa

SEQ ID NO: 5020 - DNA, 21 bp, Homo sapiens
cacgagagtctcacacttctt

SEQ ID NO: 5021 - DNA, 21 bp, Homo sapiens
gagctggtgtctgattgttaa

SEQ ID NO: 5022 - DNA, 21 bp, Homo sapiens
ccgcatgactttgactggaat

SEQ ID NO: 5023 - DNA, 21 bp, Homo sapiens
ctcggtgcagtttgtggacta

SEQ ID NO: 5024 - DNA, 21 bp, Homo sapiens
ccggccggacaagcagttcaa

SEQ ID NO: 5025 - DNA, 21 bp, Homo sapiens
ctccatcaatcctgtctggaa

SEQ ID NO: 5026 - DNA, 21 bp, Homo sapiens
gcggcttgcctggaacagata

SEQ ID NO: 5027 - DNA, 21 bp, Homo sapiens
accaataataactcatggaaa

SEQ ID NO: 5028 - DNA, 21 bp, Homo sapiens
caggtcaattcttatcagata

SEQ ID NO: 5029 - DNA, 21 bp, Homo sapiens
ctgcagattccggatattata

SEQ ID NO: 5030 - DNA, 21 bp, Homo sapiens
aacccggtagtctagaactaa

SEQ ID NO: 5031 - DNA, 21 bp, Homo sapiens
ctcgatgtaagtgatggttca

SEQ ID NO: 5032 - DNA, 21 bp, Homo sapiens
tcgaaggatgtcggtagatta

SEQ ID NO: 5033 - DNA, 21 bp, Homo sapiens
aaggatgtcggtagattacaa

SEQ ID NO: 5034 - DNA, 21 bp, Homo sapiens
ctcaggaatatcggtcttaaa

SEQ ID NO: 5035 - DNA, 21 bp, Homo sapiens
gacgcggactaccaagatcaa

SEQ ID NO: 5036 - DNA, 21 bp, Homo sapiens
tagggtctctttgcagaggaa

SEQ ID NO: 5037 - DNA, 21 bp, Homo sapiens
gacgacggttgtgaatgataa

SEQ ID NO: 5038 - DNA, 21 bp, Homo sapiens
cacgtggaagattgacagcaa

SEQ ID NO: 5039 - DNA, 21 bp, Homo sapiens
ccacaggtccttgattctcaa

SEQ ID NO: 5040 - DNA, 21 bp, Homo sapiens
ccggcctttcgaagatttcat

SEQ ID NO: 5041 - DNA, 21 bp, Homo sapiens
cagcctgctgacagacactaa

SEQ ID NO: 5042 - DNA, 21 bp, Homo sapiens
cgggacctcctgagacacaaa

SEQ ID NO: 5043 - DNA, 21 bp, Homo sapiens
ctgggagcaggaagtatagaa

SEQ ID NO: 5044 - DNA, 21 bp, Homo sapiens
ctgccgcaatcctgacggaaa

SEQ ID NO: 5045 - DNA, 21 bp, Homo sapiens
caccaccaccacaggaaagaa

SEQ ID NO: 5046 - DNA, 21 bp, Homo sapiens
caggaaagaagtgtcagtctt

SEQ ID NO: 5047 - DNA, 21 bp, Homo sapiens
ctggatgatgggttaatacaa

SEQ ID NO: 5048 - DNA, 21 bp, Homo sapiens
ctgtgacaaatcaacgggaaa

SEQ ID NO: 5049 - DNA, 21 bp, Homo sapiens
gagcatttctctaacgtttat

SEQ ID NO: 5050 - DNA, 21 bp, Homo sapiens
accattgacttaggtgcctta

SEQ ID NO: 5051 - DNA, 21 bp, Homo sapiens
acgccttatttgatttaacta

SEQ ID NO: 5052 - DNA, 21 bp, Homo sapiens
accctagtcttcgaaatgtta

SEQ ID NO: 5053 - DNA, 21 bp, Homo sapiens
gcgggtttctctaacaaataa

SEQ ID NO: 5054 - DNA, 21 bp, Homo sapiens
tggcttgtttatgaacattaa

SEQ ID NO: 5055 - DNA, 21 bp, Homo sapiens
caacggcagcgtgcagatcaa

SEQ ID NO: 5056 - DNA, 21 bp, Homo sapiens
cgcgggcaagattgtgcctaa

SEQ ID NO: 5057 - DNA, 21 bp, Homo sapiens
ccggatcaagaagaatgaata

SEQ ID NO: 5058 - DNA, 21 bp, Homo sapiens
caccatatgaattgtacagaa

SEQ ID NO: 5059 - DNA, 21 bp, Homo sapiens
acggattcatatgttcataaa

SEQ ID NO: 5060 - DNA, 21 bp, Homo sapiens
cggcattatcatggacattta

SEQ ID NO: 5061 - DNA, 21 bp, Homo sapiens
taggatgttattagagagata

SEQ ID NO: 5062 - DNA, 21 bp, Homo sapiens
atagaatatattcataatcaa

SEQ ID NO: 5063 - DNA, 21 bp, Homo sapiens
atgctggaccagctttataaa

SEQ ID NO: 5064 - DNA, 21 bp, Homo sapiens
atcctaggtctaagagttgaa

SEQ ID NO: 5065 - DNA, 21 bp, Homo sapiens
ccgggtggaatttatccttga

SEQ ID NO: 5066 - DNA, 21 bp, Homo sapiens
aacgcggacagttcaagtata

SEQ ID NO: 5067 - DNA, 21 bp, Homo sapiens
tgcggtgaaccgggaaagcaa

SEQ ID NO: 5068 - DNA, 21 bp, Homo sapiens
ctccaagatctaaaccgagaa

SEQ ID NO: 5069 - DNA, 21 bp, Homo sapiens
cagggttgtccgctctgatta

SEQ ID NO: 5070 - DNA, 21 bp, Homo sapiens
caggagcaggatagtgccttt

SEQ ID NO: 5071 - DNA, 21 bp, Homo sapiens
cagcctcgtgttgagccttaa

SEQ ID NO: 5072 - DNA, 21 bp, Homo sapiens
taggctgctattattactata

SEQ ID NO: 5073 - DNA, 21 bp, Homo sapiens
ccgcttcctgctgtacaccaa

SEQ ID NO: 5074 - DNA, 21 bp, Homo sapiens
ccgggactttgtggcttgcaa

SEQ ID NO: 5075 - DNA, 21 bp, Homo sapiens
caagtattacttggaaagcat

SEQ ID NO: 5076 - DNA, 21 bp, Homo sapiens
cccgatgggtttgctgcatat

SEQ ID NO: 5077 - DNA, 21 bp, Homo sapiens
ctagttggagatataaggtat

SEQ ID NO: 5078 - DNA, 21 bp, Homo sapiens
tcaggattgctttgtatggaa

SEQ ID NO: 5079 - DNA, 21 bp, Homo sapiens
ctggaacaaacgtgggataaa

SEQ ID NO: 5080 - DNA, 21 bp, Homo sapiens
tgcggctattgcggtaataaa

SEQ ID NO: 5081 - DNA, 21 bp, Homo sapiens
tgggtgtatatcaaacggcaa

SEQ ID NO: 5082 - DNA, 21 bp, Homo sapiens
cccggcggatatgataaattt

SEQ ID NO: 5083 - DNA, 21 bp, Homo sapiens
aaggacgatttctacatggaa

SEQ ID NO: 5084 - DNA, 21 bp, Homo sapiens
cgcgtagtatatagaacaata

SEQ ID NO: 5085 - DNA, 21 bp, Homo sapiens
aacaatgttggtgaacgtcaa

SEQ ID NO: 5086 - DNA, 21 bp, Homo sapiens
ccggacggtcacagcacccaa

SEQ ID NO: 5087 - DNA, 21 bp, Homo sapiens
ccggagcgaatgaggcctgta

SEQ ID NO: 5088 - DNA, 21 bp, Homo sapiens
cccaataggagtcttaattta

SEQ ID NO: 5089 - DNA, 21 bp, Homo sapiens
tacgagttcatccatcaattt

SEQ ID NO: 5090 - DNA, 21 bp, Homo sapiens
caagatattgtactaaatgaa

SEQ ID NO: 5091 - DNA, 21 bp, Homo sapiens
ccagattatgatgatttccta

SEQ ID NO: 5092 - DNA, 21 bp, Homo sapiens
ctggatggatccatctaacta

SEQ ID NO: 5093 - DNA, 21 bp, Homo sapiens
ccgcctctccattgacctgaa

SEQ ID NO: 5094 - DNA, 21 bp, Homo sapiens
ccgcatcatcctctgtacaaa

SEQ ID NO: 5095 - DNA, 21 bp, Homo sapiens
ctcactgacaatagtgccata

SEQ ID NO: 5096 - DNA, 21 bp, Homo sapiens
ctccaaggcagtggaaataaa

SEQ ID NO: 5097 - DNA, 21 bp, Homo sapiens
cagatgcgggtcacacctaaa

SEQ ID NO: 5098 - DNA, 21 bp, Homo sapiens
cacgagcaaatcttcgggcaa

SEQ ID NO: 5099 - DNA, 21 bp, Homo sapiens
cagccaaatgcccattcgcaa

SEQ ID NO: 5100 - DNA, 21 bp, Homo sapiens
gaggcagtgtcataaagtaaa

SEQ ID NO: 5101 - DNA, 21 bp, Homo sapiens
ctggttgtgagcattcgtgta

SEQ ID NO: 5102 - DNA, 21 bp, Homo sapiens
atccatttaggtgctgagtta

SEQ ID NO: 5103 - DNA, 21 bp, Homo sapiens
ctcgggaagaacaaagctaaa

SEQ ID NO: 5104 - DNA, 21 bp, Homo sapiens
caccacagtctccaacctata

SEQ ID NO: 5105 - DNA, 21 bp, Homo sapiens
ctggaggagttcaaagcccaa

SEQ ID NO: 5106 - DNA, 21 bp, Homo sapiens
acgaaataaatttgcttgata

SEQ ID NO: 5107 - DNA, 21 bp, Homo sapiens
tcactttatatgtgtaaataa

SEQ ID NO: 5108 - DNA, 21 bp, Homo sapiens
cacaccatacatgaccaagta

SEQ ID NO: 5109 - DNA, 21 bp, Homo sapiens
ctggtgcttcttgtagcttaa

SEQ ID NO: 5110 - DNA, 21 bp, Homo sapiens
cagggaagtatggctttgtaa

SEQ ID NO: 5111 - DNA, 21 bp, Homo sapiens
cagagtttatctcctgatgaa

SEQ ID NO: 5112 - DNA, 21 bp, Homo sapiens
atggatctaatcttagatgta

SEQ ID NO: 5113 - DNA, 21 bp, Homo sapiens
cagcggtgacttcgcaagcaa

SEQ ID NO: 5114 - DNA, 21 bp, Homo sapiens
cagggatgaattcattctgga

SEQ ID NO: 5115 - DNA, 21 bp, Homo sapiens
caagagattaataataatgta

SEQ ID NO: 5116 - DNA, 21 bp, Homo sapiens
aacaatgataacatactataa

SEQ ID NO: 5117 - DNA, 21 bp, Homo sapiens
aaggtctttcagaaccactaa

SEQ ID NO: 5118 - DNA, 21 bp, Homo sapiens
ctggaaggaaccatccagtaa

SEQ ID NO: 5119 - DNA, 21 bp, Homo sapiens
tccagaaataagaatgtctaa

SEQ ID NO: 5120 - DNA, 21 bp, Homo sapiens
aagaaatggaccagacactaa

SEQ ID NO: 5121 - DNA, 21 bp, Homo sapiens
ctggaaagtcattgccattaa

SEQ ID NO: 5122 - DNA, 21 bp, Homo sapiens
tagcacatgcttaaatatcaa

SEQ ID NO: 5123 - DNA, 21 bp, Homo sapiens
cccgtggagcagtgatctcta

SEQ ID NO: 5124 - DNA, 21 bp, Homo sapiens
cagtgatatcattgagcctaa

SEQ ID NO: 5125 - DNA, 21 bp, Homo sapiens
cacagactgacgaaactttaa

SEQ ID NO: 5126 - DNA, 21 bp, Homo sapiens
actgacgaaactttaaataaa

SEQ ID NO: 5127 - DNA, 21 bp, Homo sapiens
gagggcgatcttgacaggaaa

SEQ ID NO: 5128 - DNA, 21 bp, Homo sapiens
cagacaaatcaccattcgtta

SEQ ID NO: 5129 - DNA, 21 bp, Homo sapiens
ccggagaacaatcagattgaa

SEQ ID NO: 5130 - DNA, 21 bp, Homo sapiens
cagcgacttggcaatatttat

SEQ ID NO: 5131 - DNA, 21 bp, Homo sapiens
ctgggaaaccctcttcaataa

SEQ ID NO: 5132 - DNA, 21 bp, Homo sapiens
atcgaatatgctgatgaacaa

SEQ ID NO: 5133 - DNA, 21 bp, Homo sapiens
cccaatcggtacaatcgttga

SEQ ID NO: 5134 - DNA, 21 bp, Homo sapiens
cagcattagtacctacatatt

SEQ ID NO: 5135 - DNA, 21 bp, Homo sapiens
ccggagtacaagaacaacaaa

SEQ ID NO: 5136 - DNA, 21 bp, Homo sapiens
tgcaactttctggtaaactta

SEQ ID NO: 5137 - DNA, 21 bp, Homo sapiens
ataccagatcctattatataa

SEQ ID NO: 5138 - DNA, 21 bp, Homo sapiens
ccggccctggttagtgaagta

SEQ ID NO: 5139 - DNA, 21 bp, Homo sapiens
gaagttgtagatttcattcaa

SEQ ID NO: 5140 - DNA, 21 bp, Homo sapiens
tactctgtgaactttatttaa

SEQ ID NO: 5141 - DNA, 21 bp, Homo sapiens
ccagaggatgaagtagaacta

SEQ ID NO: 5142 - DNA, 21 bp, Homo sapiens
caggacctgaggactcaacta

SEQ ID NO: 5143 - DNA, 21 bp, Homo sapiens
cagcggcttggccgccagtta

SEQ ID NO: 5144 - DNA, 21 bp, Homo sapiens
cacgttattagtgccattcca

SEQ ID NO: 5145 - DNA, 21 bp, Homo sapiens
caggaagcagctgctacacaa

SEQ ID NO: 5146 - DNA, 21 bp, Homo sapiens
ctgcttggtccatctacacaa

SEQ ID NO: 5147 - DNA, 21 bp, Homo sapiens
gaggagtaagtgtacaattga

SEQ ID NO: 5148 - DNA, 21 bp, Homo sapiens
ctgcggtgaagttgaggctta

SEQ ID NO: 5149 - DNA, 21 bp, Homo sapiens
ctggttataacagcaaatgaa

SEQ ID NO: 5150 - DNA, 21 bp, Homo sapiens
aacatcgacagcattatccaa

SEQ ID NO: 5151 - DNA, 21 bp, Homo sapiens
tcaggtgactagagaatttca

SEQ ID NO: 5152 - DNA, 21 bp, Homo sapiens
aaggatagctttcttcggtat

SEQ ID NO: 5153 - DNA, 21 bp, Homo sapiens
ctgagttaggcaatcacttaa

SEQ ID NO: 5154 - DNA, 21 bp, Homo sapiens
caggtacccaccaactttata

SEQ ID NO: 5155 - DNA, 21 bp, Homo sapiens
aaccctgaagctgtaaatgaa

SEQ ID NO: 5156 - DNA, 21 bp, Homo sapiens
ctgctgaagtttcttatttaa

SEQ ID NO: 5157 - DNA, 21 bp, Homo sapiens
tacaaataaagatgccctaaa

SEQ ID NO: 5158 - DNA, 21 bp, Homo sapiens
caggcccaggaactgaagaaa

SEQ ID NO: 5159 - DNA, 21 bp, Homo sapiens
cagcaacatctaagcccttga

SEQ ID NO: 5160 - DNA, 21 bp, Homo sapiens
cacaggatcagctgcacttaa

SEQ ID NO: 5161 - DNA, 21 bp, Homo sapiens
ccgaaggaccgtcactacata

SEQ ID NO: 5162 - DNA, 21 bp, Homo sapiens
cccagcctgctgagaaagata

SEQ ID NO: 5163 - DNA, 21 bp, Homo sapiens
caccggatacaaactacttat

SEQ ID NO: 5164 - DNA, 21 bp, Homo sapiens
atggaattagatgacacttta

SEQ ID NO: 5165 - DNA, 21 bp, Homo sapiens
tgggatctgtcttggcattaa

SEQ ID NO: 5166 - DNA, 21 bp, Homo sapiens
ccgacaaattacccaagtata

SEQ ID NO: 5167 - DNA, 21 bp, Homo sapiens
tggaccaattctagataccaa

SEQ ID NO: 5168 - DNA, 21 bp, Homo sapiens
ctgacgttcgtttgaatatca

SEQ ID NO: 5169 - DNA, 21 bp, Homo sapiens
caggaaataactactaagcaa

SEQ ID NO: 5170 - DNA, 21 bp, Homo sapiens
cagaagttaggtcaagatgaa

SEQ ID NO: 5171 - DNA, 21 bp, Homo sapiens
aagcgagacataaccctagaa

SEQ ID NO: 5172 - DNA, 21 bp, Homo sapiens
ctcgccgtgtctggcactgaa

SEQ ID NO: 5173 - DNA, 21 bp, Homo sapiens
ctgcagatgatttgcggatta

SEQ ID NO: 5174 - DNA, 21 bp, Homo sapiens
atggaaggtatagagatccta

SEQ ID NO: 5175 - DNA, 21 bp, Homo sapiens
cggctacaaataacctatata

SEQ ID NO: 5176 - DNA, 21 bp, Homo sapiens
ccggaagatccaagcaacaga

SEQ ID NO: 5177 - DNA, 21 bp, Homo sapiens
cagggactacttgaccgtcaa

SEQ ID NO: 5178 - DNA, 21 bp, Homo sapiens
caggaaatgattggaatagaa

SEQ ID NO: 5179 - DNA, 21 bp, Homo sapiens
cggattcatccttaccctcaa

SEQ ID NO: 5180 - DNA, 21 bp, Homo sapiens
ccgctccctaagggtaaccta

SEQ ID NO: 5181 - DNA, 21 bp, Homo sapiens
ctgaggtggctgtttacctaa

SEQ ID NO: 5182 - DNA, 21 bp, Homo sapiens
ctccgggtggatgaccaaata

SEQ ID NO: 5183 - DNA, 21 bp, Homo sapiens
ctggaaatattgggaagtata

SEQ ID NO: 5184 - DNA, 21 bp, Homo sapiens
ctgctacttcagtaagaataa

SEQ ID NO: 5185 - DNA, 21 bp, Homo sapiens
cccattggaacaagtaagaaa

SEQ ID NO: 5186 - DNA, 21 bp, Homo sapiens
aacgagctgctttaagtgaaa

SEQ ID NO: 5187 - DNA, 21 bp, Homo sapiens
gaagttgtttatggaaatgaa

SEQ ID NO: 5188 - DNA, 21 bp, Homo sapiens
caggagattattctcaccaaa

SEQ ID NO: 5189 - DNA, 21 bp, Homo sapiens
cagcccggaaagaaatcataa

SEQ ID NO: 5190 - DNA, 21 bp, Homo sapiens
tagtttattgtgagtactcaa

SEQ ID NO: 5191 - DNA, 21 bp, Homo sapiens
taggagattagatagattcaa

SEQ ID NO: 5192 - DNA, 21 bp, Homo sapiens
aagggtttggataggatcaat

SEQ ID NO: 5193 - DNA, 21 bp, Homo sapiens
gagcctcatgaagccaactaa

SEQ ID NO: 5194 - DNA, 21 bp, Homo sapiens
tccctttatagtttctctata

SEQ ID NO: 5195 - DNA, 21 bp, Homo sapiens
gcccatataattggtaatgga

SEQ ID NO: 5196 - DNA, 21 bp, Homo sapiens
atcctttagtacagcgagtaa

SEQ ID NO: 5197 - DNA, 21 bp, Homo sapiens
tccctccgtaatatcaggaaa

SEQ ID NO: 5198 - DNA, 21 bp, Homo sapiens
ccgggaaagccagaaggacaa

SEQ ID NO: 5199 - DNA, 21 bp, Homo sapiens
caagaaggtaacaaacctcaa

SEQ ID NO: 5200 - DNA, 21 bp, Homo sapiens
aagaaggtggtcatagctcta

SEQ ID NO: 5201 - DNA, 21 bp, Homo sapiens
caggtcaagaataacacttca

SEQ ID NO: 5202 - DNA, 21 bp, Homo sapiens
aaagattatactcttaagaaa

SEQ ID NO: 5203 - DNA, 21 bp, Homo sapiens
gagcaccgtgtgggacaataa

SEQ ID NO: 5204 - DNA, 21 bp, Homo sapiens
accatgtacatagcttgataa

SEQ ID NO: 5205 - DNA, 21 bp, Homo sapiens
cacggtggagtgccgcttcta

SEQ ID NO: 5206 - DNA, 21 bp, Homo sapiens
caccgtgtgggacaataacaa

SEQ ID NO: 5207 - DNA, 21 bp, Homo sapiens
tcagctcaggatttaaatgaa

SEQ ID NO: 5208 - DNA, 21 bp, Homo sapiens
taacttcagtataccaataaa

SEQ ID NO: 5209 - DNA, 21 bp, Homo sapiens
caggaagtgaataagaagata

SEQ ID NO: 5210 - DNA, 21 bp, Homo sapiens
tggcatcatgctctaacttca

SEQ ID NO: 5211 - DNA, 21 bp, Homo sapiens
cagcaataagcatgcataata

SEQ ID NO: 5212 - DNA, 21 bp, Homo sapiens
accagagtatatttaagtata

SEQ ID NO: 5213 - DNA, 21 bp, Homo sapiens
tcgggatcagttagcaactat

SEQ ID NO: 5214 - DNA, 21 bp, Homo sapiens
cccacgatattctgtacacaa

SEQ ID NO: 5215 - DNA, 21 bp, Homo sapiens
accaatgtgttctatatgtaa

SEQ ID NO: 5216 - DNA, 21 bp, Homo sapiens
ggcattaggagtgctaatcta

SEQ ID NO: 5217 - DNA, 21 bp, Homo sapiens
ctgaccaatcaagtacactaa

SEQ ID NO: 5218 - DNA, 21 bp, Homo sapiens
cagcctgtgtagtgtgacaaa

SEQ ID NO: 5219 - DNA, 21 bp, Homo sapiens
cagcaatgaattagccttgaa

SEQ ID NO: 5220 - DNA, 21 bp, Homo sapiens
ctcaagtgttcacccagtaaa

SEQ ID NO: 5221 - DNA, 21 bp, Homo sapiens
tcacttgatcatatgacgaaa

SEQ ID NO: 5222 - DNA, 21 bp, Homo sapiens
atgattatcattagaagctaa

SEQ ID NO: 5223 - DNA, 21 bp, Homo sapiens
ctggaccgacctagatttgaa

SEQ ID NO: 5224 - DNA, 21 bp, Homo sapiens
cagctagtgccaaataattga

SEQ ID NO: 5225 - DNA, 21 bp, Homo sapiens
caaatattggttagtatttaa

SEQ ID NO: 5226 - DNA, 21 bp, Homo sapiens
atgaaataatttaaattctta

SEQ ID NO: 5227 - DNA, 21 bp, Homo sapiens
agcagatttaatagacgagta

SEQ ID NO: 5228 - DNA, 21 bp, Homo sapiens
ctgcagaaacctgttgtataa

SEQ ID NO: 5229 - DNA, 21 bp, Homo sapiens
aacttgaaagtcagcactaaa

SEQ ID NO: 5230 - DNA, 21 bp, Homo sapiens
aacggcatgtctctccaacaa

SEQ ID NO: 5231 - DNA, 21 bp, Homo sapiens
ctggccttaatgtacaataca

SEQ ID NO: 5232 - DNA, 21 bp, Homo sapiens
aaggatgttatcataggctat

SEQ ID NO: 5233 - DNA, 21 bp, Homo sapiens
cacgccattgggactgtcaaa

SEQ ID NO: 5234 - DNA, 21 bp, Homo sapiens
acgaacatggatattgttgaa

SEQ ID NO: 5235 - DNA, 21 bp, Homo sapiens
tacaagttgcttaaccaagaa

SEQ ID NO: 5236 - DNA, 21 bp, Homo sapiens
cgcagtggaatgagtccttta

SEQ ID NO: 5237 - DNA, 21 bp, Homo sapiens
cagctggttattgctaacata

SEQ ID NO: 5238 - DNA, 21 bp, Homo sapiens
caagacgtctttggaatccaa

SEQ ID NO: 5239 - DNA, 21 bp, Homo sapiens
tacaatgacgttaagtcttaa

SEQ ID NO: 5240 - DNA, 21 bp, Homo sapiens
gcccatcatattcatgtgtaa

SEQ ID NO: 5241 - DNA, 21 bp, Homo sapiens
cccgaccatggtagtgttcaa

SEQ ID NO: 5242 - DNA, 21 bp, Homo sapiens
cacggaaacacccgtacctta

SEQ ID NO: 5243 - DNA, 21 bp, Homo sapiens
agggacatcttccaatgatta

SEQ ID NO: 5244 - DNA, 21 bp, Homo sapiens
caggatgagtttagaaacttt

SEQ ID NO: 5245 - DNA, 21 bp, Homo sapiens
gaccagatttgtggcttataa

SEQ ID NO: 5246 - DNA, 21 bp, Homo sapiens
cgccgtgtgctcatcactgaa

SEQ ID NO: 5247 - DNA, 21 bp, Homo sapiens
ccggagcagcctcaaagcaga

SEQ ID NO: 5248 - DNA, 21 bp, Homo sapiens
cagcctcaaagcagaagccga

SEQ ID NO: 5249 - DNA, 21 bp, Homo sapiens
ccgcaaggagctgaagctgaa

SEQ ID NO: 5250 - DNA, 21 bp, Homo sapiens
caggacagtaagaccaagatt

SEQ ID NO: 5251 - DNA, 21 bp, Homo sapiens
aacaaagctgttaaactgtta

SEQ ID NO: 5252 - DNA, 21 bp, Homo sapiens
tcgattatttccagtgttcta

SEQ ID NO: 5253 - DNA, 21 bp, Homo sapiens
cctcagtatatttaaactcaa

SEQ ID NO: 5254 - DNA, 21 bp, Homo sapiens
caggaaggcgatcttattgaa

SEQ ID NO: 5255 - DNA, 21 bp, Homo sapiens
cagccttcaaagatgggtaaa

SEQ ID NO: 5256 - DNA, 21 bp, Homo sapiens
caccaccaacgaatacgtcta

SEQ ID NO: 5257 - DNA, 21 bp, Homo sapiens
ctgcaccaacactggctataa

SEQ ID NO: 5258 - DNA, 21 bp, Homo sapiens
acctgtgacctcaatacaata

SEQ ID NO: 5259 - DNA, 21 bp, Homo sapiens
aaacacttcaatgtagtataa

SEQ ID NO: 5260 - DNA, 21 bp, Homo sapiens
tagattactatggtacagaaa

SEQ ID NO: 5261 - DNA, 21 bp, Homo sapiens
gaggttcgtttgaagattcta

SEQ ID NO: 5262 - DNA, 21 bp, Homo sapiens
ccggtgtatataccatacaaa

SEQ ID NO: 5263 - DNA, 21 bp, Homo sapiens
ctggttatagatcgagaaaca

SEQ ID NO: 5264 - DNA, 21 bp, Homo sapiens
cacgacgacctgaggatttga

SEQ ID NO: 5265 - DNA, 21 bp, Homo sapiens
ttgagtactactaacgtttaa

SEQ ID NO: 5266 - DNA, 21 bp, Homo sapiens
gacctacaatttgattctcaa

SEQ ID NO: 5267 - DNA, 21 bp, Homo sapiens
tcgggacttaaagcccagtaa

SEQ ID NO: 5268 - DNA, 21 bp, Homo sapiens
ctggtaatagatgcatctaaa

SEQ ID NO: 5269 - DNA, 21 bp, Homo sapiens
aagcccagtaatatagtagta

SEQ ID NO: 5270 - DNA, 21 bp, Homo sapiens
aagcagttagatgaaagggaa

SEQ ID NO: 5271 - DNA, 21 bp, Homo sapiens
cagaagggtccttctccttat

SEQ ID NO: 5272 - DNA, 21 bp, Homo sapiens
tagggatgctctaacgaatta

SEQ ID NO: 5273 - DNA, 21 bp, Homo sapiens
cgggatgagcctcatccggaa

SEQ ID NO: 5274 - DNA, 21 bp, Homo sapiens
ccggagtggcatgaagctgta

SEQ ID NO: 5275 - DNA, 21 bp, Homo sapiens
aacaacgtgtatagtgcctaa

SEQ ID NO: 5276 - DNA, 21 bp, Homo sapiens
ctagatgtttaacaaatctaa

SEQ ID NO: 5277 - DNA, 21 bp, Homo sapiens
ctggatcaagtcctgaagaaa

SEQ ID NO: 5278 - DNA, 21 bp, Homo sapiens
ctggaagaattcctgaacaaa

SEQ ID NO: 5279 - DNA, 21 bp, Homo sapiens
cacaaaccacaccttcatcaa

SEQ ID NO: 5280 - DNA, 21 bp, Homo sapiens
ttccaggagtttgtcaataaa

SEQ ID NO: 5281 - DNA, 21 bp, Homo sapiens
ccggcctgccatggccatctt

SEQ ID NO: 5282 - DNA, 21 bp, Homo sapiens
cagcatttgcatggaacacat

SEQ ID NO: 5283 - DNA, 21 bp, Homo sapiens
ctggatgccatccaagttgta

SEQ ID NO: 5284 - DNA, 21 bp, Homo sapiens
ctccaatgtccttatcaacaa

SEQ ID NO: 5285 - DNA, 21 bp, Homo sapiens
ccgggccaccgtgaactcaca

SEQ ID NO: 5286 - DNA, 21 bp, Homo sapiens
acggatatcctgcatgtccaa

SEQ ID NO: 5287 - DNA, 21 bp, Homo sapiens
ctccacatgataggaggttta

SEQ ID NO: 5288 - DNA, 21 bp, Homo sapiens
tacgtgtgagtcccaaagcaa

SEQ ID NO: 5289 - DNA, 21 bp, Homo sapiens
cggaaagacttacgttattaa

SEQ ID NO: 5290 - DNA, 21 bp, Homo sapiens
acggaaagacttacgttatta

SEQ ID NO: 5291 - DNA, 21 bp, Homo sapiens
cagcgaattcgataaacggta

SEQ ID NO: 5292 - DNA, 21 bp, Homo sapiens
tgcaacgatcacgaacatgaa

SEQ ID NO: 5293 - DNA, 21 bp, Homo sapiens
cagcatattgcgatcctggaa

SEQ ID NO: 5294 - DNA, 21 bp, Homo sapiens
cccggaggctatcctatccaa

SEQ ID NO: 5295 - DNA, 21 bp, Homo sapiens
ccgagatgtagaagacactaa

SEQ ID NO: 5296 - DNA, 21 bp, Homo sapiens
ccgcctgtcaataaatgttga

SEQ ID NO: 5297 - DNA, 21 bp, Homo sapiens
cccaaggtctatgctaaatta

SEQ ID NO: 5298 - DNA, 21 bp, Homo sapiens
caccatctgcttgactatgta

SEQ ID NO: 5299 - DNA, 21 bp, Homo sapiens
aacatgcttcctgctatgtaa

SEQ ID NO: 5300 - DNA, 21 bp, Homo sapiens
ttgattaatttaagtatttaa

SEQ ID NO: 5301 - DNA, 21 bp, Homo sapiens
cccagtgaggagacagaccaa

SEQ ID NO: 5302 - DNA, 21 bp, Homo sapiens
ttgggagagctacatctacaa

SEQ ID NO: 5303 - DNA, 21 bp, Homo sapiens
ctgaccctgatgcttaataaa

SEQ ID NO: 5304 - DNA, 21 bp, Homo sapiens
cacgtttgatttcttcctgca

SEQ ID NO: 5305 - DNA, 21 bp, Homo sapiens
ctgcagatttctcacctgtaa

SEQ ID NO: 5306 - DNA, 21 bp, Homo sapiens
caccatgcactcaataaagaa

SEQ ID NO: 5307 - DNA, 21 bp, Homo sapiens
ccgggtcaaagttgagctgaa

SEQ ID NO: 5308 - DNA, 21 bp, Homo sapiens
cggtgaagtgattggaattaa

SEQ ID NO: 5309 - DNA, 21 bp, Homo sapiens
agcgtatataattgaagtaat

SEQ ID NO: 5310 - DNA, 21 bp, Homo sapiens
cgacgtcataatcagcatcaa

SEQ ID NO: 5311 - DNA, 21 bp, Homo sapiens
ccgacatatgcaagaactata

SEQ ID NO: 5312 - DNA, 21 bp, Homo sapiens
aagaactatatcagccagtat

SEQ ID NO: 5313 - DNA, 21 bp, Homo sapiens
caagctgattgacaacaacaa

SEQ ID NO: 5314 - DNA, 21 bp, Homo sapiens
ctgcctgaatgtaacctgcta

SEQ ID NO: 5315 - DNA, 21 bp, Homo sapiens
ctcaggttccaaattcagtaa

SEQ ID NO: 5316 - DNA, 21 bp, Homo sapiens
ctgaggttgctttatcctaaa

SEQ ID NO: 5317 - DNA, 21 bp, Homo sapiens
caggcatatctcattatgatt

SEQ ID NO: 5318 - DNA, 21 bp, Homo sapiens
cagctctcatttactcctcaa

SEQ ID NO: 5319 - DNA, 21 bp, Homo sapiens
cccatggaacctcaaagagca

SEQ ID NO: 5320 - DNA, 21 bp, Homo sapiens
atccttgtacctgatgtctga

SEQ ID NO: 5321 - DNA, 21 bp, Homo sapiens
ctgcctgtgtctcgtcttgta

SEQ ID NO: 5322 - DNA, 21 bp, Homo sapiens
tccattggaattgttggtaaa

SEQ ID NO: 5323 - DNA, 21 bp, Homo sapiens
cacagttggtctgaaatcaaa

SEQ ID NO: 5324 - DNA, 21 bp, Homo sapiens
atggagtgtaatttaaatgaa

SEQ ID NO: 5325 - DNA, 21 bp, Homo sapiens
atgcaagaatatactcagtca

SEQ ID NO: 5326 - DNA, 21 bp, Homo sapiens
atgagggacgaccatatttat

SEQ ID NO: 5327 - DNA, 21 bp, Homo sapiens
aaggattacttggctgccata

SEQ ID NO: 5328 - DNA, 21 bp, Homo sapiens
gagatacattatgtaaataaa

SEQ ID NO: 5329 - DNA, 21 bp, Homo sapiens
cagggtggccttacatcagta

SEQ ID NO: 5330 - DNA, 21 bp, Homo sapiens
cacagtgactcacttattcaa

SEQ ID NO: 5331 - DNA, 21 bp, Homo sapiens
accgaagtggttaggactcta

SEQ ID NO: 5332 - DNA, 21 bp, Homo sapiens
ccagggattgtgtttaaagta

SEQ ID NO: 5333 - DNA, 21 bp, Homo sapiens
aacagatgatctgaccattaa

SEQ ID NO: 5334 - DNA, 21 bp, Homo sapiens
gaccattaagctggtgatcaa

SEQ ID NO: 5335 - DNA, 21 bp, Homo sapiens
atggatgagtctcgatgtgta

SEQ ID NO: 5336 - DNA, 21 bp, Homo sapiens
cacactgagtgtcctacaata

SEQ ID NO: 5337 - DNA, 21 bp, Homo sapiens
ccggatctgcatagtgaccaa

SEQ ID NO: 5338 - DNA, 21 bp, Homo sapiens
atcggtggacttgatgaagaa

SEQ ID NO: 5339 - DNA, 21 bp, Homo sapiens
cgcactcttgataaatggtta

SEQ ID NO: 5340 - DNA, 21 bp, Homo sapiens
aagatgcgaaatggatatgaa

SEQ ID NO: 5341 - DNA, 21 bp, Homo sapiens
cagcaatattgtccagatgaa

SEQ ID NO: 5342 - DNA, 21 bp, Homo sapiens
gtgactatggatataattgaa

SEQ ID NO: 5343 - DNA, 21 bp, Homo sapiens
tcgcattatgcgagtcaacaa

SEQ ID NO: 5344 - DNA, 21 bp, Homo sapiens
atgcttggtgtagcctatgaa

SEQ ID NO: 5345 - DNA, 21 bp, Homo sapiens
accattgtctacagagaccaa

SEQ ID NO: 5346 - DNA, 21 bp, Homo sapiens
cacatgatcagtggctttgaa

SEQ ID NO: 5347 - DNA, 21 bp, Homo sapiens
cgcctgaatcctgggattcta

SEQ ID NO: 5348 - DNA, 21 bp, Homo sapiens
tgggattctagtatgcaataa

SEQ ID NO: 5349 - DNA, 21 bp, Homo sapiens
ctgggattctagtatgcaata

SEQ ID NO: 5350 - DNA, 21 bp, Homo sapiens
ctccgggagctcctacatcta

SEQ ID NO: 5351 - DNA, 21 bp, Homo sapiens
ctgcaaatgtggtgagaaata

SEQ ID NO: 5352 - DNA, 21 bp, Homo sapiens
gtgagaaatatcagctataaa

SEQ ID NO: 5353 - DNA, 21 bp, Homo sapiens
aaggaggtcaggtatatggaa

SEQ ID NO: 5354 - DNA, 21 bp, Homo sapiens
cagcacctttatctatggtta

SEQ ID NO: 5355 - DNA, 21 bp, Homo sapiens
cccagacagtgaagccactaa

SEQ ID NO: 5356 - DNA, 21 bp, Homo sapiens
caggctatggaggtggagtaa

SEQ ID NO: 5357 - DNA, 21 bp, Homo sapiens
cacacggatggtggcgtccaa

SEQ ID NO: 5358 - DNA, 21 bp, Homo sapiens
ctgcgagaagatccacttcat

SEQ ID NO: 5359 - DNA, 21 bp, Homo sapiens
caaggttatcatggctactaa

SEQ ID NO: 5360 - DNA, 21 bp, Homo sapiens
ccgggtggctctaaggaatga

SEQ ID NO: 5361 - DNA, 21 bp, Homo sapiens
aaggtacatcctgaaggtaaa

SEQ ID NO: 5362 - DNA, 21 bp, Homo sapiens
ttggtcaaggtacatcctgaa

SEQ ID NO: 5363 - DNA, 21 bp, Homo sapiens
ctgagaaatgtttgtactgaa

SEQ ID NO: 5364 - DNA, 21 bp, Homo sapiens
aaggagttaagggaacaatta

SEQ ID NO: 5365 - DNA, 21 bp, Homo sapiens
caggctgtgagtgatatctta

SEQ ID NO: 5366 - DNA, 21 bp, Homo sapiens
ttggaaggcatcgtaaataaa

SEQ ID NO: 5367 - DNA, 21 bp, Homo sapiens
tagcgaacactttgactccaa

SEQ ID NO: 5368 - DNA, 21 bp, Homo sapiens
cagggttccagacgcatacaa

SEQ ID NO: 5369 - DNA, 21 bp, Homo sapiens
ctccggagggctgtaccttta

SEQ ID NO: 5370 - DNA, 21 bp, Homo sapiens
tgggtgtgttccgaaagttta

SEQ ID NO: 5371 - DNA, 21 bp, Homo sapiens
atgggtttaaatttaacataa

SEQ ID NO: 5372 - DNA, 21 bp, Homo sapiens
aaggattacattcgaacacaa

SEQ ID NO: 5373 - DNA, 21 bp, Homo sapiens
cagagactcatagcagagcaa

SEQ ID NO: 5374 - DNA, 21 bp, Homo sapiens
taggctgaaattctactttaa

SEQ ID NO: 5375 - DNA, 21 bp, Homo sapiens
tgccaataggctgaaattcta

SEQ ID NO: 5376 - DNA, 21 bp, Homo sapiens
ccggcataagggagctggtaa

SEQ ID NO: 5377 - DNA, 21 bp, Homo sapiens
accaagcttcattagtcttaa

SEQ ID NO: 5378 - DNA, 21 bp, Homo sapiens
cccgtcattagtgctctttca

SEQ ID NO: 5379 - DNA, 21 bp, Homo sapiens
tcgcacagaactccactcaaa

SEQ ID NO: 5380 - DNA, 21 bp, Homo sapiens
acagcatacctcctaggtaaa

SEQ ID NO: 5381 - DNA, 21 bp, Homo sapiens
aagcataatttcttaccctat

SEQ ID NO: 5382 - DNA, 21 bp, Homo sapiens
tccagtatctgagataatata

SEQ ID NO: 5383 - DNA, 21 bp, Homo sapiens
ccggtgcagcaattccactaa

SEQ ID NO: 5384 - DNA, 21 bp, Homo sapiens
ccagtatctgagataatataa

SEQ ID NO: 5385 - DNA, 21 bp, Homo sapiens
aacaaatatcgctaaacctta

SEQ ID NO: 5386 - DNA, 21 bp, Homo sapiens
ccgctatagagtattccataa

SEQ ID NO: 5387 - DNA, 21 bp, Homo sapiens
aaggaccgatttgagcactaa

SEQ ID NO: 5388 - DNA, 21 bp, Homo sapiens
atcgataccattattcaaata

SEQ ID NO: 5389 - DNA, 21 bp, Homo sapiens
tcgggcgacaggagccagaaa

SEQ ID NO: 5390 - DNA, 21 bp, Homo sapiens
cagaaagaatggttctctcaa

SEQ ID NO: 5391 - DNA, 21 bp, Homo sapiens
cccatccatctcattgtctaa

SEQ ID NO: 5392 - DNA, 21 bp, Homo sapiens
cccagggtcctgaataaataa

SEQ ID NO: 5393 - DNA, 21 bp, Homo sapiens
tcgtattgctgctgaatttaa

SEQ ID NO: 5394 - DNA, 21 bp, Homo sapiens
tagggtagaatcacctgtaaa

SEQ ID NO: 5395 - DNA, 21 bp, Homo sapiens
cccgcagtacagaaagtatca

SEQ ID NO: 5396 - DNA, 21 bp, Homo sapiens
acgctttatgctgaagcccta

SEQ ID NO: 5397 - DNA, 21 bp, Homo sapiens
agggaagcccaggaaagataa

SEQ ID NO: 5398 - DNA, 21 bp, Homo sapiens
ctccattgtgctcaacttcat

SEQ ID NO: 5399 - DNA, 21 bp, Homo sapiens
cgccgtgagcatcttcgtcaa

SEQ ID NO: 5400 - DNA, 21 bp, Homo sapiens
cagcataatggaatcagacaa

SEQ ID NO: 5401 - DNA, 21 bp, Homo sapiens
aacgcctctatgtaatgtata

SEQ ID NO: 5402 - DNA, 21 bp, Homo sapiens
ctgaatacggttagagttcta

SEQ ID NO: 5403 - DNA, 21 bp, Homo sapiens
tggcatgtgggatcaattaaa

SEQ ID NO: 5404 - DNA, 21 bp, Homo sapiens
aaggtgttacttaataatagt

SEQ ID NO: 5405 - DNA, 21 bp, Homo sapiens
ccggtcgaatgataaggtgta

SEQ ID NO: 5406 - DNA, 21 bp, Homo sapiens
cccaggtttactgaacttaaa

SEQ ID NO: 5407 - DNA, 21 bp, Homo sapiens
cacctgggtactggtatggaa

SEQ ID NO: 5408 - DNA, 21 bp, Homo sapiens
aacaatttatgttcacattaa

SEQ ID NO: 5409 - DNA, 21 bp, Homo sapiens
acgccacagcacaagtgataa

SEQ ID NO: 5410 - DNA, 21 bp, Homo sapiens
ccgagagaagcccactattaa

SEQ ID NO: 5411 - DNA, 21 bp, Homo sapiens
atgggacatggtaccgttgta

SEQ ID NO: 5412 - DNA, 21 bp, Homo sapiens
acggttcgaggtcttcaagaa

SEQ ID NO: 5413 - DNA, 21 bp, Homo sapiens
ctggagctgagtgcaagcaaa

SEQ ID NO: 5414 - DNA, 21 bp, Homo sapiens
accgtaggctttgtattcaaa

SEQ ID NO: 5415 - DNA, 21 bp, Homo sapiens
taccgtaggctttgtattcaa

SEQ ID NO: 5416 - DNA, 21 bp, Homo sapiens
tacatgataaatgatagacaa

SEQ ID NO: 5417 - DNA, 21 bp, Homo sapiens
cacaaaggagttacatcttaa

SEQ ID NO: 5418 - DNA, 21 bp, Homo sapiens
tcgattgaattgtactggata

SEQ ID NO: 5419 - DNA, 21 bp, Homo sapiens
ccgctgtacttggaaattcga

SEQ ID NO: 5420 - DNA, 21 bp, Homo sapiens
aactgtattcatacatgtcaa

SEQ ID NO: 5421 - DNA, 21 bp, Homo sapiens
ccgctcatttgctgacttcaa

SEQ ID NO: 5422 - DNA, 21 bp, Homo sapiens
ccgagaaatgctggtcacaaa

SEQ ID NO: 5423 - DNA, 21 bp, Homo sapiens
ccgggtattattgcagggaaa

SEQ ID NO: 5424 - DNA, 21 bp, Homo sapiens
caggttattcagcgatagtta

SEQ ID NO: 5425 - DNA, 21 bp, Homo sapiens
agcacgtaccttagaactcta

SEQ ID NO: 5426 - DNA, 21 bp, Homo sapiens
ctccgtcatcaacacaagcta

SEQ ID NO: 5427 - DNA, 21 bp, Homo sapiens
tccgtcatcaacacaagctaa

SEQ ID NO: 5428 - DNA, 21 bp, Homo sapiens
ctccgaacaaatagtaaataa

SEQ ID NO: 5429 - DNA, 21 bp, Homo sapiens
ccagttcattgaaaccactaa

SEQ ID NO: 5430 - DNA, 21 bp, Homo sapiens
ccgcacctcgtccaaacacaa

SEQ ID NO: 5431 - DNA, 21 bp, Homo sapiens
taggccctgatgagaacgcta

SEQ ID NO: 5432 - DNA, 21 bp, Homo sapiens
ccggaacaaatgcgtcccata

SEQ ID NO: 5433 - DNA, 21 bp, Homo sapiens
gccgctcatgactatacgcta

SEQ ID NO: 5434 - DNA, 21 bp, Homo sapiens
gcggtccagcattatattgaa

SEQ ID NO: 5435 - DNA, 21 bp, Homo sapiens
ccgctcatgactatacgctaa

SEQ ID NO: 5436 - DNA, 21 bp, Homo sapiens
cagaagcacagtaccgattta

SEQ ID NO: 5437 - DNA, 21 bp, Homo sapiens
gtggatcatgataacacttca

SEQ ID NO: 5438 - DNA, 21 bp, Homo sapiens
ctgcttgtagacatgttaata

SEQ ID NO: 5439 - DNA, 21 bp, Homo sapiens
ttgcaggttatcagagatcaa

SEQ ID NO: 5440 - DNA, 21 bp, Homo sapiens
aagcttaatgaggaaatatca

SEQ ID NO: 5441 - DNA, 21 bp, Homo sapiens
ccagtattagtggagacttaa

SEQ ID NO: 5442 - DNA, 21 bp, Homo sapiens
tcgggtgtatcagactaatta

SEQ ID NO: 5443 - DNA, 21 bp, Homo sapiens
ccggtcgactttatcaagtta

SEQ ID NO: 5444 - DNA, 21 bp, Homo sapiens
cccggagatgtggataactat

SEQ ID NO: 5445 - DNA, 21 bp, Homo sapiens
atggcattatcaccaagtata

SEQ ID NO: 5446 - DNA, 21 bp, Homo sapiens
cgccttgttaatattatgcca

SEQ ID NO: 5447 - DNA, 21 bp, Homo sapiens
ctgggtgtcattgaagcaata

SEQ ID NO: 5448 - DNA, 21 bp, Homo sapiens
acggccagtcccgaacagtaa

SEQ ID NO: 5449 - DNA, 21 bp, Homo sapiens
tcgaagcacagcacacactaa

SEQ ID NO: 5450 - DNA, 21 bp, Homo sapiens
caggtactgacatcaccctaa

SEQ ID NO: 5451 - DNA, 21 bp, Homo sapiens
ccgggtcattgtatacgtgtt

SEQ ID NO: 5452 - DNA, 21 bp, Homo sapiens
ccgggacgttgtacaatttca

SEQ ID NO: 5453 - DNA, 21 bp, Homo sapiens
acccgtatcttctacaatcaa

SEQ ID NO: 5454 - DNA, 21 bp, Homo sapiens
acgagtcgtcatctaactata

SEQ ID NO: 5455 - DNA, 21 bp, Homo sapiens
tcgggtagaaataaccaccaa

SEQ ID NO: 5456 - DNA, 21 bp, Homo sapiens
tccgagtatgtctaccattta

SEQ ID NO: 5457 - DNA, 21 bp, Homo sapiens
caggatttgtatcgctgtgta

SEQ ID NO: 5458 - DNA, 21 bp, Homo sapiens
ccggcgagtcaagttatcaaa

SEQ ID NO: 5459 - DNA, 21 bp, Homo sapiens
ctggagattagtgtatgatta

SEQ ID NO: 5460 - DNA, 21 bp, Homo sapiens
ccgggttaaatgctataaata

SEQ ID NO: 5461 - DNA, 21 bp, Homo sapiens
ctggtgaagtctgaactggaa

SEQ ID NO: 5462 - DNA, 21 bp, Homo sapiens
caggaaggtgaacaagtgcta

SEQ ID NO: 5463 - DNA, 21 bp, Homo sapiens
caggtctggcttggcacccaa

SEQ ID NO: 5464 - DNA, 21 bp, Homo sapiens
cacccttcactgagttacgaa

SEQ ID NO: 5465 - DNA, 21 bp, Homo sapiens
cagcttcaaagtagagtagaa

SEQ ID NO: 5466 - DNA, 21 bp, Homo sapiens
ccgggaagacttagccttaaa

SEQ ID NO: 5467 - DNA, 21 bp, Homo sapiens
aaccctttgtgtctataccaa

SEQ ID NO: 5468 - DNA, 21 bp, Homo sapiens
taggtttatcacacagcctaa

SEQ ID NO: 5469 - DNA, 21 bp, Homo sapiens
tcgcctcattggaaagaagaa

SEQ ID NO: 5470 - DNA, 21 bp, Homo sapiens
cgccaccagattgtcaattca

SEQ ID NO: 5471 - DNA, 21 bp, Homo sapiens
cagactaattacactgagata

SEQ ID NO: 5472 - DNA, 21 bp, Homo sapiens
ccgccaaatttatatcattaa

SEQ ID NO: 5473 - DNA, 21 bp, Homo sapiens
tagccatataccaatacctaa

SEQ ID NO: 5474 - DNA, 21 bp, Homo sapiens
acgctggaatttggtagtgaa

SEQ ID NO: 5475 - DNA, 21 bp, Homo sapiens
tcgaatgtgttaccaaggtta

SEQ ID NO: 5476 - DNA, 21 bp, Homo sapiens
ctgcagcaccaatgttattaa

SEQ ID NO: 5477 - DNA, 21 bp, Homo sapiens
cagtatatgattagaaatgaa

SEQ ID NO: 5478 - DNA, 21 bp, Homo sapiens
cagcaccaatgttattaataa

SEQ ID NO: 5479 - DNA, 21 bp, Homo sapiens
caggtggaggtcaatatcaca

SEQ ID NO: 5480 - DNA, 21 bp, Homo sapiens
caggtgaacgactccatgtat

SEQ ID NO: 5481 - DNA, 21 bp, Homo sapiens
agggctgttgtcagaattcta

SEQ ID NO: 5482 - DNA, 21 bp, Homo sapiens
acagatcagtctgtcaataaa

SEQ ID NO: 5483 - DNA, 21 bp, Homo sapiens
cccgtgacactcaggagttaa

SEQ ID NO: 5484 - DNA, 21 bp, Homo sapiens
cagagtcatagccaagcccaa

SEQ ID NO: 5485 - DNA, 21 bp, Homo sapiens
ctggacgacactggagtggaa

SEQ ID NO: 5486 - DNA, 21 bp, Homo sapiens
caggtcatctttgtccgagaa

SEQ ID NO: 5487 - DNA, 21 bp, Homo sapiens
accgatcgctggtatgatgaa

SEQ ID NO: 5488 - DNA, 21 bp, Homo sapiens
ccagttcacaagaccagtaaa

SEQ ID NO: 5489 - DNA, 21 bp, Homo sapiens
tacgtcagctacctatgataa

SEQ ID NO: 5490 - DNA, 21 bp, Homo sapiens
cagcttccttgggcagtgtaa

SEQ ID NO: 5491 - DNA, 21 bp, Homo sapiens
cacactcgtaaaggaccgcaa

SEQ ID NO: 5492 - DNA, 21 bp, Homo sapiens
ctacctgtctttagagttcta

SEQ ID NO: 5493 - DNA, 21 bp, Homo sapiens
tcgggatgtggccaaagtgaa

SEQ ID NO: 5494 - DNA, 21 bp, Homo sapiens
caagttgaagtttgctgccta

SEQ ID NO: 5495 - DNA, 21 bp, Homo sapiens
cagatgggtcatattctttat

SEQ ID NO: 5496 - DNA, 21 bp, Homo sapiens
atgggtgtgattgtcttccta

SEQ ID NO: 5497 - DNA, 21 bp, Homo sapiens
tacggtcttctttgaggtcaa

SEQ ID NO: 5498 - DNA, 21 bp, Homo sapiens
cccacttattgtcaccttgta

SEQ ID NO: 5499 - DNA, 21 bp, Homo sapiens
acggtatttaagagagaacta

SEQ ID NO: 5500 - DNA, 21 bp, Homo sapiens
gagaactatattggtattaaa

SEQ ID NO: 5501 - DNA, 21 bp, Homo sapiens
tcggtcagcctcagaattcca

SEQ ID NO: 5502 - DNA, 21 bp, Homo sapiens
ctggctctactgcgtgaacaa

SEQ ID NO: 5503 - DNA, 21 bp, Homo sapiens
aaggatgttattatcaagtca

SEQ ID NO: 5504 - DNA, 21 bp, Homo sapiens
tacgctgtatgacagtattaa

SEQ ID NO: 5505 - DNA, 21 bp, Homo sapiens
acgctgtatgacagtattaat

SEQ ID NO: 5506 - DNA, 21 bp, Homo sapiens
ccggagaagttaccagatgta

SEQ ID NO: 5507 - DNA, 21 bp, Homo sapiens
gaacaagatctgtcaatttaa

SEQ ID NO: 5508 - DNA, 21 bp, Homo sapiens
cagccgatcgatcgacctcaa

SEQ ID NO: 5509 - DNA, 21 bp, Homo sapiens
cccgactggaatccactctaa

SEQ ID NO: 5510 - DNA, 21 bp, Homo sapiens
caccatgatttctccatataa

SEQ ID NO: 5511 - DNA, 21 bp, Homo sapiens
tacattgtacaaggaatgaaa

SEQ ID NO: 5512 - DNA, 21 bp, Homo sapiens
gggcatttaattcatctttaa

SEQ ID NO: 5513 - DNA, 21 bp, Homo sapiens
acgatgttctgtacaacttaa

SEQ ID NO: 5514 - DNA, 21 bp, Homo sapiens
aaggttggtattatcaggaaa

SEQ ID NO: 5515 - DNA, 21 bp, Homo sapiens
gacatgcttgctgatcagcta

SEQ ID NO: 5516 - DNA, 21 bp, Homo sapiens
caacgtgatggtggacgggaa

SEQ ID NO: 5517 - DNA, 21 bp, Homo sapiens
cgcgcccatgcaggccatcaa

SEQ ID NO: 5518 - DNA, 21 bp, Homo sapiens
ccgggagattggctctgtgaa

SEQ ID NO: 5519 - DNA, 21 bp, Homo sapiens
cccagtaacgcctgctgttta

SEQ ID NO: 5520 - DNA, 21 bp, Homo sapiens
ctcactctctgtaagcatata

SEQ ID NO: 5521 - DNA, 21 bp, Homo sapiens
ctgggtggaaataagcttata

SEQ ID NO: 5522 - DNA, 21 bp, Homo sapiens
ctggaagaggtagctcagaaa

SEQ ID NO: 5523 - DNA, 21 bp, Homo sapiens
tcgggtaattaatctggccaa

SEQ ID NO: 5524 - DNA, 21 bp, Homo sapiens
cagctgaaggatggttcatat

SEQ ID NO: 5525 - DNA, 21 bp, Homo sapiens
caggagtgactcaagaattaa

SEQ ID NO: 5526 - DNA, 21 bp, Homo sapiens
aaggaaggaaataatcatcta

SEQ ID NO: 5527 - DNA, 21 bp, Homo sapiens
cagcagtattctatttggtta

SEQ ID NO: 5528 - DNA, 21 bp, Homo sapiens
tagtgtgaagttgatacgcaa

SEQ ID NO: 5529 - DNA, 21 bp, Homo sapiens
ttgggaattcttgctgttaaa

SEQ ID NO: 5530 - DNA, 21 bp, Homo sapiens
atgtggtttgtacatatcaaa

SEQ ID NO: 5531 - DNA, 21 bp, Homo sapiens
ctcggtgaaggaggagaccaa

SEQ ID NO: 5532 - DNA, 21 bp, Homo sapiens
cggcgccagacgcggagggaa

SEQ ID NO: 5533 - DNA, 21 bp, Homo sapiens
acggaagattctggaccctaa

SEQ ID NO: 5534 - DNA, 21 bp, Homo sapiens
aggcaagagcctcaaactcaa

SEQ ID NO: 5535 - DNA, 21 bp, Homo sapiens
aatggtgtactgtatacttta

SEQ ID NO: 5536 - DNA, 21 bp, Homo sapiens
tagcatcagtagttcaataaa

SEQ ID NO: 5537 - DNA, 21 bp, Homo sapiens
gacgagtactgtggatgtgaa

SEQ ID NO: 5538 - DNA, 21 bp, Homo sapiens
cagtataatgtcttagattaa

SEQ ID NO: 5539 - DNA, 21 bp, Homo sapiens
ccggctcatcgtcacctttga

SEQ ID NO: 5540 - DNA, 21 bp, Homo sapiens
ccaccttgtcttctcactcaa

SEQ ID NO: 5541 - DNA, 21 bp, Homo sapiens
aaggcatagtccatcgatcta

SEQ ID NO: 5542 - DNA, 21 bp, Homo sapiens
accagtgtattccgtcaagta

SEQ ID NO: 5543 - DNA, 21 bp, Homo sapiens
ccagtgtattccgtcaagtaa

SEQ ID NO: 5544 - DNA, 21 bp, Homo sapiens
cagagataattgcctatacta

SEQ ID NO: 5545 - DNA, 21 bp, Homo sapiens
aaggtggtcttagtaatataa

SEQ ID NO: 5546 - DNA, 21 bp, Homo sapiens
tagaatagaggcaaagcctaa

SEQ ID NO: 5547 - DNA, 21 bp, Homo sapiens
tacggttctttcgtagaacaa

SEQ ID NO: 5548 - DNA, 21 bp, Homo sapiens
ctcacttaagtttgatatcaa

SEQ ID NO: 5549 - DNA, 21 bp, Homo sapiens
ctgccggaagagggactggaa

SEQ ID NO: 5550 - DNA, 21 bp, Homo sapiens
cccaatgggaggaaacggaaa

SEQ ID NO: 5551 - DNA, 21 bp, Homo sapiens
cagggagaggaacccgttcta

SEQ ID NO: 5552 - DNA, 21 bp, Homo sapiens
ctggaagaaacccgagtgcaa

SEQ ID NO: 5553 - DNA, 21 bp, Homo sapiens
aaggtgaaagatggctattta

SEQ ID NO: 5554 - DNA, 21 bp, Homo sapiens
aagaaggaacaccaaacttta

SEQ ID NO: 5555 - DNA, 21 bp, Homo sapiens
ctcgagatgtaaattctatta

SEQ ID NO: 5556 - DNA, 21 bp, Homo sapiens
atggcttatctaagacagcaa

SEQ ID NO: 5557 - DNA, 21 bp, Homo sapiens
ctggtttgacattgctaagta

SEQ ID NO: 5558 - DNA, 21 bp, Homo sapiens
acgattgaagttgatagtatt

SEQ ID NO: 5559 - DNA, 21 bp, Homo sapiens
cggcaagtaaagaatctgcta

SEQ ID NO: 5560 - DNA, 21 bp, Homo sapiens
gcggacgtttcttaagaagaa

SEQ ID NO: 5561 - DNA, 21 bp, Homo sapiens
cagatgcttaattgagctcta

SEQ ID NO: 5562 - DNA, 21 bp, Homo sapiens
aaggaatggtatcacagtcta

SEQ ID NO: 5563 - DNA, 21 bp, Homo sapiens
gacgctatcattcacgatcaa

SEQ ID NO: 5564 - DNA, 21 bp, Homo sapiens
ccaggtctaaatctccctata

SEQ ID NO: 5565 - DNA, 21 bp, Homo sapiens
atagtggttcttcgtattcaa

SEQ ID NO: 5566 - DNA, 21 bp, Homo sapiens
cccagttaagtcattcctcta

SEQ ID NO: 5567 - DNA, 21 bp, Homo sapiens
ctggatgtttcaaatgagtta

SEQ ID NO: 5568 - DNA, 21 bp, Homo sapiens
ctccaggtttctgcaaacaaa

SEQ ID NO: 5569 - DNA, 21 bp, Homo sapiens
caccaagtgaccaacttataa

SEQ ID NO: 5570 - DNA, 21 bp, Homo sapiens
acaggctaatgtggagtataa

SEQ ID NO: 5571 - DNA, 21 bp, Homo sapiens
caggaggaaattacagagaca

SEQ ID NO: 5572 - DNA, 21 bp, Homo sapiens
ccaaatggctgtatttataaa

SEQ ID NO: 5573 - DNA, 21 bp, Homo sapiens
ctggtacgccatggccaagaa

SEQ ID NO: 5574 - DNA, 21 bp, Homo sapiens
ccagatgagcgccacagccaa

SEQ ID NO: 5575 - DNA, 21 bp, Homo sapiens
ccctgccaagttcaagatgaa

SEQ ID NO: 5576 - DNA, 21 bp, Homo sapiens
ctggatcgtcgacacagacta

SEQ ID NO: 5577 - DNA, 21 bp, Homo sapiens
cagcaccacaccatccctaaa

SEQ ID NO: 5578 - DNA, 21 bp, Homo sapiens
cacggtgaaagtgctgctcta

SEQ ID NO: 5579 - DNA, 21 bp, Homo sapiens
gaggagcgatgtgatgaataa

SEQ ID NO: 5580 - DNA, 21 bp, Homo sapiens
cacggatttagtcccacccta

SEQ ID NO: 5581 - DNA, 21 bp, Homo sapiens
cccagtctttggaaccctaaa

SEQ ID NO: 5582 - DNA, 21 bp, Homo sapiens
cagcaattacaacggagtcaa

SEQ ID NO: 5583 - DNA, 21 bp, Homo sapiens
ctgcaattactatgaagtcaa

SEQ ID NO: 5584 - DNA, 21 bp, Homo sapiens
ctcagtctctagagccctgaa

SEQ ID NO: 5585 - DNA, 21 bp, Homo sapiens
cacagatgaattggagatcat

SEQ ID NO: 5586 - DNA, 21 bp, Homo sapiens
cagctacggcgtggacaagaa

SEQ ID NO: 5587 - DNA, 21 bp, Homo sapiens
gcggatttgccgaattaacaa

SEQ ID NO: 5588 - DNA, 21 bp, Homo sapiens
ccagattgccattgtgttcaa

SEQ ID NO: 5589 - DNA, 21 bp, Homo sapiens
atcaaggtccctgataattat

SEQ ID NO: 5590 - DNA, 21 bp, Homo sapiens
caccatgagcgtggaggcgta

SEQ ID NO: 5591 - DNA, 21 bp, Homo sapiens
catcttattctgggtaataaa

SEQ ID NO: 5592 - DNA, 21 bp, Homo sapiens
acggagcgctgcacaccgaaa

SEQ ID NO: 5593 - DNA, 21 bp, Homo sapiens
atccatcttgcctccaattta

SEQ ID NO: 5594 - DNA, 21 bp, Homo sapiens
ctgtattctaaacattagtaa

SEQ ID NO: 5595 - DNA, 21 bp, Homo sapiens
ctggatgacctcgatgatgaa

SEQ ID NO: 5596 - DNA, 21 bp, Homo sapiens
ctggacctgttgaaagagaaa

SEQ ID NO: 5597 - DNA, 21 bp, Homo sapiens
caggcattacctgacagctta

SEQ ID NO: 5598 - DNA, 21 bp, Homo sapiens
ctggaggaacgtggacctgaa

SEQ ID NO: 5599 - DNA, 21 bp, Homo sapiens
ttgataaagaacttaactata

SEQ ID NO: 5600 - DNA, 21 bp, Homo sapiens
tgcctggatgtgtaaatacaa

SEQ ID NO: 5601 - DNA, 21 bp, Homo sapiens
aagtatatatcaataagtata

SEQ ID NO: 5602 - DNA, 21 bp, Homo sapiens
acggatcatcttgtagcatga

SEQ ID NO: 5603 - DNA, 21 bp, Homo sapiens
ccagatttctaaagtcagaaa

SEQ ID NO: 5604 - DNA, 21 bp, Homo sapiens
cagaatttctagggcaaagaa

SEQ ID NO: 5605 - DNA, 21 bp, Homo sapiens
cacagtgacgagaatattcaa

SEQ ID NO: 5606 - DNA, 21 bp, Homo sapiens
ccagagtgccatcgaaggtaa

SEQ ID NO: 5607 - DNA, 21 bp, Homo sapiens
ccgaaagaagctggtgtccaa

SEQ ID NO: 5608 - DNA, 21 bp, Homo sapiens
cagggtcagatcagaccacaa

SEQ ID NO: 5609 - DNA, 21 bp, Homo sapiens
ctggagctggtgaatgagaaa

SEQ ID NO: 5610 - DNA, 21 bp, Homo sapiens
cagccaataagaggacacaaa

SEQ ID NO: 5611 - DNA, 21 bp, Homo sapiens
ccctgtgttcacagcaataaa

SEQ ID NO: 5612 - DNA, 21 bp, Homo sapiens
cacttagatagtattctctaa

SEQ ID NO: 5613 - DNA, 21 bp, Homo sapiens
gccaatgttaatttccaggaa

SEQ ID NO: 5614 - DNA, 21 bp, Homo sapiens
cccgaaatgtcctgtcatcta

SEQ ID NO: 5615 - DNA, 21 bp, Homo sapiens
ccagactacactagtccataa

SEQ ID NO: 5616 - DNA, 21 bp, Homo sapiens
cacctggacatgtcaattaaa

SEQ ID NO: 5617 - DNA, 21 bp, Homo sapiens
cacgcctgctgttaaatacaa

SEQ ID NO: 5618 - DNA, 21 bp, Homo sapiens
ccgaagcatcttagccgatga

SEQ ID NO: 5619 - DNA, 21 bp, Homo sapiens
ctggacatgaaggccattgaa

SEQ ID NO: 5620 - DNA, 21 bp, Homo sapiens
caccaggaagatttctggaaa

SEQ ID NO: 5621 - DNA, 21 bp, Homo sapiens
acccataaatacatgttgtaa

SEQ ID NO: 5622 - DNA, 21 bp, Homo sapiens
atggctagaaagtatggttta

SEQ ID NO: 5623 - DNA, 21 bp, Homo sapiens
ccagttgggttctaaattgta

SEQ ID NO: 5624 - DNA, 21 bp, Homo sapiens
ctgattgacatttgataaata

SEQ ID NO: 5625 - DNA, 21 bp, Homo sapiens
taggatgtgccgggcctacaa

SEQ ID NO: 5626 - DNA, 21 bp, Homo sapiens
ccgggcctacaatgctgacaa

SEQ ID NO: 5627 - DNA, 21 bp, Homo sapiens
aaggagctcttcagcactgaa

SEQ ID NO: 5628 - DNA, 21 bp, Homo sapiens
cgggttcatctgagtaaacat

SEQ ID NO: 5629 - DNA, 21 bp, Homo sapiens
tctgttgttgagaataataaa

SEQ ID NO: 5630 - DNA, 21 bp, Homo sapiens
aaggaagatgagactaagcca

SEQ ID NO: 5631 - DNA, 21 bp, Homo sapiens
cccggtaaattctggtttaaa

SEQ ID NO: 5632 - DNA, 21 bp, Homo sapiens
tccgaagggcaaattggttta

SEQ ID NO: 5633 - DNA, 21 bp, Homo sapiens
cacagctttgataacagatat

SEQ ID NO: 5634 - DNA, 21 bp, Homo sapiens
atgagcctgaattccaatgaa

SEQ ID NO: 5635 - DNA, 21 bp, Homo sapiens
cggcaagctgatcaagaacaa

SEQ ID NO: 5636 - DNA, 21 bp, Homo sapiens
tggcgtgatgtctcacagaaa

SEQ ID NO: 5637 - DNA, 21 bp, Homo sapiens
ttcgtgtgacaaacagagata

SEQ ID NO: 5638 - DNA, 21 bp, Homo sapiens
aaacttatgaacagcaactaa

SEQ ID NO: 5639 - DNA, 21 bp, Homo sapiens
cagcgcaagattgatcagaaa

SEQ ID NO: 5640 - DNA, 21 bp, Homo sapiens
gaccggaagccgggaccttaa

SEQ ID NO: 5641 - DNA, 21 bp, Homo sapiens
ctggttggttaataaacagta

SEQ ID NO: 5642 - DNA, 21 bp, Homo sapiens
acgcttcaaagaggcaaataa

SEQ ID NO: 5643 - DNA, 21 bp, Homo sapiens
caccttggtggagaacaagaa

SEQ ID NO: 5644 - DNA, 21 bp, Homo sapiens
acaggtgaactcggaagacaa

SEQ ID NO: 5645 - DNA, 21 bp, Homo sapiens
caccaccttggtggagaacaa

SEQ ID NO: 5646 - DNA, 21 bp, Homo sapiens
caggtgaactcggaagacaaa

SEQ ID NO: 5647 - DNA, 21 bp, Homo sapiens
ctcaataaagtttgtgtttat

SEQ ID NO: 5648 - DNA, 21 bp, Homo sapiens
ccgggcgtaccacaaatataa

SEQ ID NO: 5649 - DNA, 21 bp, Homo sapiens
caggctgatgaataagatcta

SEQ ID NO: 5650 - DNA, 21 bp, Homo sapiens
cggactatttgtagtcatgta

SEQ ID NO: 5651 - DNA, 21 bp, Homo sapiens
cccgttgttaccggtattgta

SEQ ID NO: 5652 - DNA, 21 bp, Homo sapiens
cagcaaagccttgcaatccca

SEQ ID NO: 5653 - DNA, 21 bp, Homo sapiens
tggccttatgtcagttgtcta

SEQ ID NO: 5654 - DNA, 21 bp, Homo sapiens
cagaaacaggttgacaactca

SEQ ID NO: 5655 - DNA, 21 bp, Homo sapiens
atccgggttcatccgacacca

SEQ ID NO: 5656 - DNA, 21 bp, Homo sapiens
aacatttcaataaaggatcat

SEQ ID NO: 5657 - DNA, 21 bp, Homo sapiens
ccacatatatgcgaatctata

SEQ ID NO: 5658 - DNA, 21 bp, Homo sapiens
ctggaagagtctacaatgtta

SEQ ID NO: 5659 - DNA, 21 bp, Homo sapiens
aagaggaatcagaaacctgaa

SEQ ID NO: 5660 - DNA, 21 bp, Homo sapiens
aaggctaagcaagcatctaaa

SEQ ID NO: 5661 - DNA, 21 bp, Homo sapiens
caggttgtacgtggacactat

SEQ ID NO: 5662 - DNA, 21 bp, Homo sapiens
caggaataaagtaatcttata

SEQ ID NO: 5663 - DNA, 21 bp, Homo sapiens
caggaagatggtggccgcaaa

SEQ ID NO: 5664 - DNA, 21 bp, Homo sapiens
ctgaaatagagtactatgcta

SEQ ID NO: 5665 - DNA, 21 bp, Homo sapiens
agggagtttcattaaatgcta

SEQ ID NO: 5666 - DNA, 21 bp, Homo sapiens
ccggatcaacttcgacaaata

SEQ ID NO: 5667 - DNA, 21 bp, Homo sapiens
cagatcaaataaagttataaa

SEQ ID NO: 5668 - DNA, 21 bp, Homo sapiens
atcgctgatcgtcagatcaaa

SEQ ID NO: 5669 - DNA, 21 bp, Homo sapiens
aagcacagagtcagaaagcta

SEQ ID NO: 5670 - DNA, 21 bp, Homo sapiens
cagtatatgatcactaatata

SEQ ID NO: 5671 - DNA, 21 bp, Homo sapiens
ccgagatgaaacagaattcta

SEQ ID NO: 5672 - DNA, 21 bp, Homo sapiens
gcgcttatgtatataaagcaa

SEQ ID NO: 5673 - DNA, 21 bp, Homo sapiens
ctgaaggtcacgatcatgtta

SEQ ID NO: 5674 - DNA, 21 bp, Homo sapiens
ttggttggctggattcagtaa

SEQ ID NO: 5675 - DNA, 21 bp, Homo sapiens
ctggttgagttcacatcatat

SEQ ID NO: 5676 - DNA, 21 bp, Homo sapiens
aagctagagccatcaatacaa

SEQ ID NO: 5677 - DNA, 21 bp, Homo sapiens
ctgcatctactcggccctcat

SEQ ID NO: 5678 - DNA, 21 bp, Homo sapiens
aagaaagtggaagcaaagaaa

SEQ ID NO: 5679 - DNA, 21 bp, Homo sapiens
cagcgtgggtatcgaggcgga

SEQ ID NO: 5680 - DNA, 21 bp, Homo sapiens
cagcgccaaggacatcaagaa

SEQ ID NO: 5681 - DNA, 21 bp, Homo sapiens
aaggaggagtctgaagagtca

SEQ ID NO: 5682 - DNA, 21 bp, Homo sapiens
caaggttatcagtgagctgaa

SEQ ID NO: 5683 - DNA, 21 bp, Homo sapiens
cacctttgatgccatttctaa

SEQ ID NO: 5684 - DNA, 21 bp, Homo sapiens
ccgcttggtcaaggacatgaa

SEQ ID NO: 5685 - DNA, 21 bp, Homo sapiens
cggcaagatggcagtgcaaat

SEQ ID NO: 5686 - DNA, 21 bp, Homo sapiens
gaggttgtggtgtctgggaaa

SEQ ID NO: 5687 - DNA, 21 bp, Homo sapiens
ccggaagaagatgatggaaat

SEQ ID NO: 5688 - DNA, 21 bp, Homo sapiens
cacctgctatgttcaatataa

SEQ ID NO: 5689 - DNA, 21 bp, Homo sapiens
cagatctttgtacgtaattaa

SEQ ID NO: 5690 - DNA, 21 bp, Homo sapiens
aagaattggtgtgatcaccaa

SEQ ID NO: 5691 - DNA, 21 bp, Homo sapiens
caccgatgatgtgcagatcaa

SEQ ID NO: 5692 - DNA, 21 bp, Homo sapiens
ctcgaactcctatgccattaa

SEQ ID NO: 5693 - DNA, 21 bp, Homo sapiens
atccagtcagaaataagattt

SEQ ID NO: 5694 - DNA, 21 bp, Homo sapiens
ttgagtaacaaataaataaga

SEQ ID NO: 5695 - DNA, 21 bp, Homo sapiens
ctggaacacgctgtaccggaa

SEQ ID NO: 5696 - DNA, 21 bp, Homo sapiens
ctcgatatctgacgcagctaa

SEQ ID NO: 5697 - DNA, 21 bp, Homo sapiens
ccggaggtcctgaagcgtcaa

SEQ ID NO: 5698 - DNA, 21 bp, Homo sapiens
ccgagtgagatcgaagatgga

SEQ ID NO: 5699 - DNA, 21 bp, Homo sapiens
ttggagttctatcttaggaaa

SEQ ID NO: 5700 - DNA, 21 bp, Homo sapiens
tcagagtgttgtactcgtaaa

SEQ ID NO: 5701 - DNA, 21 bp, Homo sapiens
acggcgtctgttcgaaggcaa

SEQ ID NO: 5702 - DNA, 21 bp, Homo sapiens
cccgcggagacccttcgagaa

SEQ ID NO: 5703 - DNA, 21 bp, Homo sapiens
cgcagagatgttgatgcctaa

SEQ ID NO: 5704 - DNA, 21 bp, Homo sapiens
accgcgcatgctccttccttt

SEQ ID NO: 5705 - DNA, 21 bp, Homo sapiens
ccctgcgtaatcgataaggaa

SEQ ID NO: 5706 - DNA, 21 bp, Homo sapiens
cgggaagatggcggacattca

SEQ ID NO: 5707 - DNA, 21 bp, Homo sapiens
aaggttgatgacaacaagaaa

SEQ ID NO: 5708 - DNA, 21 bp, Homo sapiens
aagattcaacttcacccgtaa

SEQ ID NO: 5709 - DNA, 21 bp, Homo sapiens
caggaggaaataggaccaaga

SEQ ID NO: 5710 - DNA, 21 bp, Homo sapiens
ccgagatgaatcctcaccata

SEQ ID NO: 5711 - DNA, 21 bp, Homo sapiens
taccagaaatcctaccgataa

SEQ ID NO: 5712 - DNA, 21 bp, Homo sapiens
ccctcgtcgctgcgagtccaa

SEQ ID NO: 5713 - DNA, 21 bp, Homo sapiens
ccgcaacaagatagcaggtta

SEQ ID NO: 5714 - DNA, 21 bp, Homo sapiens
aagcgaattcagagaggccca

SEQ ID NO: 5715 - DNA, 21 bp, Homo sapiens
tggctccatgaccaagatcta

SEQ ID NO: 5716 - DNA, 21 bp, Homo sapiens
aagaagcattagaacaaacca

SEQ ID NO: 5717 - DNA, 21 bp, Homo sapiens
ctgggttaataaattgcctca

SEQ ID NO: 5718 - DNA, 21 bp, Homo sapiens
aacaagaagcattagaacaaa

SEQ ID NO: 5719 - DNA, 21 bp, Homo sapiens
tggaatatttgtcataaataa

SEQ ID NO: 5720 - DNA, 21 bp, Homo sapiens
cggcgagttcgtggacctgta

SEQ ID NO: 5721 - DNA, 21 bp, Homo sapiens
cgcaagaacattaataaacta

SEQ ID NO: 5722 - DNA, 21 bp, Homo sapiens
caagaacattaataaactaaa

SEQ ID NO: 5723 - DNA, 21 bp, Homo sapiens
ttgtctgactacaatattcaa

SEQ ID NO: 5724 - DNA, 21 bp, Homo sapiens
ctggctgtcctgaaatattat

SEQ ID NO: 5725 - DNA, 21 bp, Homo sapiens
ctgacttactgtttcaacaaa

SEQ ID NO: 5726 - DNA, 21 bp, Homo sapiens
aaggtggatgagaatggcaaa

SEQ ID NO: 5727 - DNA, 21 bp, Homo sapiens
agcgtttgtgtttcaagttaa

SEQ ID NO: 5728 - DNA, 21 bp, Homo sapiens
ctgagatgctcctttaaataa

SEQ ID NO: 5729 - DNA, 21 bp, Homo sapiens
atgataattctttgtatataa

SEQ ID NO: 5730 - DNA, 21 bp, Homo sapiens
ccggcacggtctgatccggaa

SEQ ID NO: 5731 - DNA, 21 bp, Homo sapiens
ccgagatttctcttacaatta

SEQ ID NO: 5732 - DNA, 21 bp, Homo sapiens
ctgagagtatataacaacaca

SEQ ID NO: 5733 - DNA, 21 bp, Homo sapiens
aacggatatattgagaatcaa

SEQ ID NO: 5734 - DNA, 21 bp, Homo sapiens
ctggtgggtctctagaagcaa

SEQ ID NO: 5735 - DNA, 21 bp, Homo sapiens
caaggacagggtacaaactta

SEQ ID NO: 5736 - DNA, 21 bp, Homo sapiens
ctgggtttggcacaatcttta

SEQ ID NO: 5737 - DNA, 21 bp, Homo sapiens
cccacgtcagttacacattaa

SEQ ID NO: 5738 - DNA, 21 bp, Homo sapiens
cagcagagaattgactagata

SEQ ID NO: 5739 - DNA, 21 bp, Homo sapiens
ctgaagatcaggaagaagtaa

SEQ ID NO: 5740 - DNA, 21 bp, Homo sapiens
accgcactcttcccaaataaa

SEQ ID NO: 5741 - DNA, 21 bp, Homo sapiens
caggaagaagaaagacctgaa

SEQ ID NO: 5742 - DNA, 21 bp, Homo sapiens
aaccgcactcttcccaaataa

SEQ ID NO: 5743 - DNA, 21 bp, Homo sapiens
caggaggaaggtgggtctgaa

SEQ ID NO: 5744 - DNA, 21 bp, Homo sapiens
taggctgagcctgctcatgta

SEQ ID NO: 5745 - DNA, 21 bp, Homo sapiens
taggcatctaataaatgctta

SEQ ID NO: 5746 - DNA, 21 bp, Homo sapiens
gccgatcaggctgccaataaa

SEQ ID NO: 5747 - DNA, 21 bp, Homo sapiens
atggcatataataggcatcta

SEQ ID NO: 5748 - DNA, 21 bp, Homo sapiens
aagctgagatatggcatataa

SEQ ID NO: 5749 - DNA, 21 bp, Homo sapiens
tccattcgggattatattcaa

SEQ ID NO: 5750 - DNA, 21 bp, Homo sapiens
ccgggtcaaggcagtgacgaa

SEQ ID NO: 5751 - DNA, 21 bp, Homo sapiens
ccgaagatgactcggatacaa

SEQ ID NO: 5752 - DNA, 21 bp, Homo sapiens
aaggtggtaatcctgacgaaa

SEQ ID NO: 5753 - DNA, 21 bp, Homo sapiens
ctgccatattgtagctcaata

SEQ ID NO: 5754 - DNA, 21 bp, Homo sapiens
acggactgtagtaatggataa

SEQ ID NO: 5755 - DNA, 21 bp, Homo sapiens
ccctcagaatttctccaacta

SEQ ID NO: 5756 - DNA, 21 bp, Homo sapiens
cagaagcctgttccctacaaa

SEQ ID NO: 5757 - DNA, 21 bp, Homo sapiens
caagctgattgtatcagagaa

SEQ ID NO: 5758 - DNA, 21 bp, Homo sapiens
atgcttgtacagaatgatata

SEQ ID NO: 5759 - DNA, 21 bp, Homo sapiens
taggaagtagggagaaatgaa

SEQ ID NO: 5760 - DNA, 21 bp, Homo sapiens
cggcctgagggtcacaataat

SEQ ID NO: 5761 - DNA, 21 bp, Homo sapiens
cccgggaatgtctcggcgaaa

SEQ ID NO: 5762 - DNA, 21 bp, Homo sapiens
aagctgggcactgcttaccaa

SEQ ID NO: 5763 - DNA, 21 bp, Homo sapiens
cggcgctaaggtggccatcaa

SEQ ID NO: 5764 - DNA, 21 bp, Homo sapiens
cacaggcaagacgctgttcaa

SEQ ID NO: 5765 - DNA, 21 bp, Homo sapiens
tggaagcgtgttacttacaaa

SEQ ID NO: 5766 - DNA, 21 bp, Homo sapiens
ctggacgtattcactcctgat

SEQ ID NO: 5767 - DNA, 21 bp, Homo sapiens
ccagtttgatgaagaacttta

SEQ ID NO: 5768 - DNA, 21 bp, Homo sapiens
ctgatgaaaccatgtaataaa

SEQ ID NO: 5769 - DNA, 21 bp, Homo sapiens
tgggtacgcgatgaactgaaa

SEQ ID NO: 5770 - DNA, 21 bp, Homo sapiens
cactcttattgttgtatgcaa

SEQ ID NO: 5771 - DNA, 21 bp, Homo sapiens
accgaatataccaggacgaaa

SEQ ID NO: 5772 - DNA, 21 bp, Homo sapiens
tccaagcaattcatactataa

SEQ ID NO: 5773 - DNA, 21 bp, Homo sapiens
gacgcctgtgttccacaatta

SEQ ID NO: 5774 - DNA, 21 bp, Homo sapiens
tccggtcgttaccgaccacta

SEQ ID NO: 5775 - DNA, 21 bp, Homo sapiens
ccgcgtggtgtggccctgtta

SEQ ID NO: 5776 - DNA, 21 bp, Homo sapiens
cagcgccgagctcttccgtaa

SEQ ID NO: 5777 - DNA, 21 bp, Homo sapiens
atggatcaactactaaacaaa

SEQ ID NO: 5778 - DNA, 21 bp, Homo sapiens
ctgacggattattatttataa

SEQ ID NO: 5779 - DNA, 21 bp, Homo sapiens
aaggtaatattggcagcaata

SEQ ID NO: 5780 - DNA, 21 bp, Homo sapiens
ctcgtgctatctggagtccta

SEQ ID NO: 5781 - DNA, 21 bp, Homo sapiens
taggattcggatcatcaccta

SEQ ID NO: 5782 - DNA, 21 bp, Homo sapiens
tcggatcatcacctacttcaa

SEQ ID NO: 5783 - DNA, 21 bp, Homo sapiens
ccacattgaggtagtggacaa

SEQ ID NO: 5784 - DNA, 21 bp, Homo sapiens
cacattgaggtagtggacaaa

SEQ ID NO: 5785 - DNA, 21 bp, Homo sapiens
cagagatgatttactgctaca

SEQ ID NO: 5786 - DNA, 21 bp, Homo sapiens
accgccatgcatgatgggtaa

SEQ ID NO: 5787 - DNA, 21 bp, Homo sapiens
cagcgtaatttcagatgttat

SEQ ID NO: 5788 - DNA, 21 bp, Homo sapiens
aaagctgatagtctatgtcaa

SEQ ID NO: 5789 - DNA, 21 bp, Homo sapiens
ttggatttatgtgaggtcaaa

SEQ ID NO: 5790 - DNA, 21 bp, Homo sapiens
ctcccataataaattatataa

SEQ ID NO: 5791 - DNA, 21 bp, Homo sapiens
gacgcctacatcagtgatgaa

SEQ ID NO: 5792 - DNA, 21 bp, Homo sapiens
aacgctgaacatgctcatcaa

SEQ ID NO: 5793 - DNA, 21 bp, Homo sapiens
caagattgccttggactgcaa

SEQ ID NO: 5794 - DNA, 21 bp, Homo sapiens
ctggctcaatgtcaaggtcaa

SEQ ID NO: 5795 - DNA, 21 bp, Homo sapiens
cccgctgtggatgtccatcaa

SEQ ID NO: 5796 - DNA, 21 bp, Homo sapiens
ctggagcactacaacatgaca

SEQ ID NO: 5797 - DNA, 21 bp, Homo sapiens
ctggaccaaggtgaaagtcaa

SEQ ID NO: 5798 - DNA, 21 bp, Homo sapiens
tcctgtaagagtattaacaaa

SEQ ID NO: 5799 - DNA, 21 bp, Homo sapiens
tccaatgagtaaacaaactaa

SEQ ID NO: 5800 - DNA, 21 bp, Homo sapiens
cccagcattattgaacatcat

SEQ ID NO: 5801 - DNA, 21 bp, Homo sapiens
agagatgttcatgctactaaa

SEQ ID NO: 5802 - DNA, 21 bp, Homo sapiens
ccgatggtaattaagcttgta

SEQ ID NO: 5803 - DNA, 21 bp, Homo sapiens
cgggctctttctcgatttgaa

SEQ ID NO: 5804 - DNA, 21 bp, Homo sapiens
tcccgggaggtcaacatgcaa

SEQ ID NO: 5805 - DNA, 21 bp, Homo sapiens
cacaggcgaatgtgtcatgaa

SEQ ID NO: 5806 - DNA, 21 bp, Homo sapiens
ccgctccatggcactctctaa

SEQ ID NO: 5807 - DNA, 21 bp, Homo sapiens
ctgcacctttggcatgatgta

SEQ ID NO: 5808 - DNA, 21 bp, Homo sapiens
cagcctcaacatcaacctcaa

SEQ ID NO: 5809 - DNA, 21 bp, Homo sapiens
tacaggtacccggaaattaaa

SEQ ID NO: 5810 - DNA, 21 bp, Homo sapiens
cccgatgtatggaaactgcta

SEQ ID NO: 5811 - DNA, 21 bp, Homo sapiens
ccggaacttcacgtccatctt

SEQ ID NO: 5812 - DNA, 21 bp, Homo sapiens
cacgtccatcttctaccctca

SEQ ID NO: 5813 - DNA, 21 bp, Homo sapiens
tcggccaaccctggaactgaa

SEQ ID NO: 5814 - DNA, 21 bp, Homo sapiens
ctgcaatgacacccagtacaa

SEQ ID NO: 5815 - DNA, 21 bp, Homo sapiens
ctgcagggagtctgcattcaa

SEQ ID NO: 5816 - DNA, 21 bp, Homo sapiens
ccgcaatggctgagcaccgaa

SEQ ID NO: 5817 - DNA, 21 bp, Homo sapiens
ctgcagggaggcagaaggcaa

SEQ ID NO: 5818 - DNA, 21 bp, Homo sapiens
cacacttgggctgctctgaaa

SEQ ID NO: 5819 - DNA, 21 bp, Homo sapiens
cggcggtagcatcattcacaa

SEQ ID NO: 5820 - DNA, 21 bp, Homo sapiens
aagagtggacactaaccacaa

SEQ ID NO: 5821 - DNA, 21 bp, Homo sapiens
caaggccggcaagtaaacaaa

SEQ ID NO: 5822 - DNA, 21 bp, Homo sapiens
atcccgggacctgaactatta

SEQ ID NO: 5823 - DNA, 21 bp, Homo sapiens
cagcgagcaggacgcagagaa

SEQ ID NO: 5824 - DNA, 21 bp, Homo sapiens
ctggcgctgctgcagaaggaa

SEQ ID NO: 5825 - DNA, 21 bp, Homo sapiens
accaataaaggaggaatcaga

SEQ ID NO: 5826 - DNA, 21 bp, Homo sapiens
gtggtacttggcaccaataaa

SEQ ID NO: 5827 - DNA, 21 bp, Homo sapiens
cacaggatggctggtcagaaa

SEQ ID NO: 5828 - DNA, 21 bp, Homo sapiens
cagaaagggacagggaaataa

SEQ ID NO: 5829 - DNA, 21 bp, Homo sapiens
ctccttcttctctgaaagaaa

SEQ ID NO: 5830 - DNA, 21 bp, Homo sapiens
ccggatgctcaccagcagaaa

SEQ ID NO: 5831 - DNA, 21 bp, Homo sapiens
ttgggattaatacttcaacta

SEQ ID NO: 5832 - DNA, 21 bp, Homo sapiens
ttggatgtatatgtcatctca

SEQ ID NO: 5833 - DNA, 21 bp, Homo sapiens
tggaagcatattgttattata

SEQ ID NO: 5834 - DNA, 21 bp, Homo sapiens
aagatttgctttaattgttaa

SEQ ID NO: 5835 - DNA, 21 bp, Homo sapiens
ctgggtgaagatgattctcaa

SEQ ID NO: 5836 - DNA, 21 bp, Homo sapiens
tacctttgacttggtattata

SEQ ID NO: 5837 - DNA, 21 bp, Homo sapiens
taagctggagttatatatgta

SEQ ID NO: 5838 - DNA, 21 bp, Homo sapiens
caggtaaaggacataaatgtt

SEQ ID NO: 5839 - DNA, 21 bp, Homo sapiens
gacagagttcatgatgtcaaa

SEQ ID NO: 5840 - DNA, 21 bp, Homo sapiens
tagagcaattcatctaataaa

SEQ ID NO: 5841 - DNA, 21 bp, Homo sapiens
caggaagaattgaacttgtca

SEQ ID NO: 5842 - DNA, 21 bp, Homo sapiens
ctcctggagagttactttgaa

SEQ ID NO: 5843 - DNA, 21 bp, Homo sapiens
ctgcatgttctttgtttccaa

SEQ ID NO: 5844 - DNA, 21 bp, Homo sapiens
caggcctgatgaccatagtaa

SEQ ID NO: 5845 - DNA, 21 bp, Homo sapiens
cagagatatcctggcaaccaa

SEQ ID NO: 5846 - DNA, 21 bp, Homo sapiens
aggagtgatcttcaccaccaa

SEQ ID NO: 5847 - DNA, 21 bp, Homo sapiens
ccacggtgtgacgaaatgcaa

SEQ ID NO: 5848 - DNA, 21 bp, Homo sapiens
cagcaagatgacatcaaagat

SEQ ID NO: 5849 - DNA, 21 bp, Homo sapiens
cggagctgtggtagtaattca

SEQ ID NO: 5850 - DNA, 21 bp, Homo sapiens
caccatcaagccaccaacata

SEQ ID NO: 5851 - DNA, 21 bp, Homo sapiens
tccgactgctttggacctaaa

SEQ ID NO: 5852 - DNA, 21 bp, Homo sapiens
gccgcaaattgtggctactaa

SEQ ID NO: 5853 - DNA, 21 bp, Homo sapiens
cagggcctcctggacaggaaa

SEQ ID NO: 5854 - DNA, 21 bp, Homo sapiens
caggaggaattctatgcctga

SEQ ID NO: 5855 - DNA, 21 bp, Homo sapiens
gacgctgaatatacagaacaa

SEQ ID NO: 5856 - DNA, 21 bp, Homo sapiens
ccgtttagtcatatctatcta

SEQ ID NO: 5857 - DNA, 21 bp, Homo sapiens
atgaatagacataaattgtaa

SEQ ID NO: 5858 - DNA, 21 bp, Homo sapiens
aaggtacgagtagaggtttaa

SEQ ID NO: 5859 - DNA, 21 bp, Homo sapiens
agagattgtgatgattcttaa

SEQ ID NO: 5860 - DNA, 21 bp, Homo sapiens
gagattgtgatgattcttaaa

SEQ ID NO: 5861 - DNA, 21 bp, Homo sapiens
ttgactcttaagattatgtaa

SEQ ID NO: 5862 - DNA, 21 bp, Homo sapiens
tgggatggtcttagaatattt

SEQ ID NO: 5863 - DNA, 21 bp, Homo sapiens
cagattgatcatctgccttaa

SEQ ID NO: 5864 - DNA, 21 bp, Homo sapiens
tcggagatgctttgtaatcta

SEQ ID NO: 5865 - DNA, 21 bp, Homo sapiens
ctgcaaattgggcgtcgtcta

SEQ ID NO: 5866 - DNA, 21 bp, Homo sapiens
aagagtgaacatgtacacaaa

SEQ ID NO: 5867 - DNA, 21 bp, Homo sapiens
caggatattcaccttgcgaaa

SEQ ID NO: 5868 - DNA, 21 bp, Homo sapiens
acggcacaaggaagcattgaa

SEQ ID NO: 5869 - DNA, 21 bp, Homo sapiens
catggtagaattggagagtaa

SEQ ID NO: 5870 - DNA, 21 bp, Homo sapiens
accagtgtggtttgtgtttga

SEQ ID NO: 5871 - DNA, 21 bp, Homo sapiens
cggaaagtatttcaagcctaa

SEQ ID NO: 5872 - DNA, 21 bp, Homo sapiens
caggttgaatgcaccactcaa

SEQ ID NO: 5873 - DNA, 21 bp, Homo sapiens
tccatggaacctactaccaaa

SEQ ID NO: 5874 - DNA, 21 bp, Homo sapiens
cagcaatttgtccgtcaacta

SEQ ID NO: 5875 - DNA, 21 bp, Homo sapiens
atggagatacagaccactcaa

SEQ ID NO: 5876 - DNA, 21 bp, Homo sapiens
acggaggcacagaccactcaa

SEQ ID NO: 5877 - DNA, 21 bp, Homo sapiens
agggtagttatacaccataaa

SEQ ID NO: 5878 - DNA, 21 bp, Homo sapiens
cagggtagttatacaccataa

SEQ ID NO: 5879 - DNA, 21 bp, Homo sapiens
tagcatgatttcttcaagtaa

SEQ ID NO: 5880 - DNA, 21 bp, Homo sapiens
tacatagtagtttacctttaa

SEQ ID NO: 5881 - DNA, 21 bp, Homo sapiens
acgaatgttgttactggcaca

SEQ ID NO: 5882 - DNA, 21 bp, Homo sapiens
taggctaagctatttgggaaa

SEQ ID NO: 5883 - DNA, 21 bp, Homo sapiens
ctgcgaggagtacgactacta

SEQ ID NO: 5884 - DNA, 21 bp, Homo sapiens
ccgctgggacaagaagaataa

SEQ ID NO: 5885 - DNA, 21 bp, Homo sapiens
cacaatatggttcaaatgtaa

SEQ ID NO: 5886 - DNA, 21 bp, Homo sapiens
cagactgataataaacctcta

SEQ ID NO: 5887 - DNA, 21 bp, Homo sapiens
tcgggcaaatcctgatcctaa

SEQ ID NO: 5888 - DNA, 21 bp, Homo sapiens
cccaatttcactcaaatgttt

SEQ ID NO: 5889 - DNA, 21 bp, Homo sapiens
cgggactactatagcagatca

SEQ ID NO: 5890 - DNA, 21 bp, Homo sapiens
cccgatctgaatctaggtcta

SEQ ID NO: 5891 - DNA, 21 bp, Homo sapiens
cacagcagggatgaggacaga

SEQ ID NO: 5892 - DNA, 21 bp, Homo sapiens
acagatggtgtgagtcagtga

SEQ ID NO: 5893 - DNA, 21 bp, Homo sapiens
aacatggaagtcaacgtttat

SEQ ID NO: 5894 - DNA, 21 bp, Homo sapiens
cccaccatctctggtctacaa

SEQ ID NO: 5895 - DNA, 21 bp, Homo sapiens
acggcttgcaccattcagcta

SEQ ID NO: 5896 - DNA, 21 bp, Homo sapiens
aagggacgagatcgttagcta

SEQ ID NO: 5897 - DNA, 21 bp, Homo sapiens
tgctgccaatatcctaataaa

SEQ ID NO: 5898 - DNA, 21 bp, Homo sapiens
taggattaggattgttgtgaa

SEQ ID NO: 5899 - DNA, 21 bp, Homo sapiens
ctacctggaagcagaaatgaa

SEQ ID NO: 5900 - DNA, 21 bp, Homo sapiens
aggagtttggccagaagtcaa

SEQ ID NO: 5901 - DNA, 21 bp, Homo sapiens
ctgcttcgatttaagcaagta

SEQ ID NO: 5902 - DNA, 21 bp, Homo sapiens
atgggtggtaatatggagtta

SEQ ID NO: 5903 - DNA, 21 bp, Homo sapiens
atgcagatttctagtgcatta

SEQ ID NO: 5904 - DNA, 21 bp, Homo sapiens
cactttgaattgtgcacataa

SEQ ID NO: 5905 - DNA, 21 bp, Homo sapiens
cccacggacaatgaagactat

SEQ ID NO: 5906 - DNA, 21 bp, Homo sapiens
aacctctaacaaagtgaggaa

SEQ ID NO: 5907 - DNA, 21 bp, Homo sapiens
tagcaccttatgtcagggaaa

SEQ ID NO: 5908 - DNA, 21 bp, Homo sapiens
taggaagtaaacgatctgcaa

SEQ ID NO: 5909 - DNA, 21 bp, Homo sapiens
aaggtgctcttagaaacacta

SEQ ID NO: 5910 - DNA, 21 bp, Homo sapiens
ccgcctggactttgactacaa

SEQ ID NO: 5911 - DNA, 21 bp, Homo sapiens
acggtccagggcaaactgaaa

SEQ ID NO: 5912 - DNA, 21 bp, Homo sapiens
acgccctaagcgggagtataa

SEQ ID NO: 5913 - DNA, 21 bp, Homo sapiens
ccgggaaggaggcacaaggaa

SEQ ID NO: 5914 - DNA, 21 bp, Homo sapiens
acgagtgaaggtgtctcagaa

SEQ ID NO: 5915 - DNA, 21 bp, Homo sapiens
tgggaagattggcattcataa

SEQ ID NO: 5916 - DNA, 21 bp, Homo sapiens
cagcaccttcactgtcaagta

SEQ ID NO: 5917 - DNA, 21 bp, Homo sapiens
cagcaaattcaatttgttaaa

SEQ ID NO: 5918 - DNA, 21 bp, Homo sapiens
ccggagagttgtggactttat

SEQ ID NO: 5919 - DNA, 21 bp, Homo sapiens
cacaatatccagcgagagaaa

SEQ ID NO: 5920 - DNA, 21 bp, Homo sapiens
tcggttgggcttcctcctgaa

SEQ ID NO: 5921 - DNA, 21 bp, Homo sapiens
ctggcttaataatattaataa

SEQ ID NO: 5922 - DNA, 21 bp, Homo sapiens
cagaaagacatttgtggacaa

SEQ ID NO: 5923 - DNA, 21 bp, Homo sapiens
cacagaaagatcggaatctga

SEQ ID NO: 5924 - DNA, 21 bp, Homo sapiens
atccagtttgatcctagctaa

SEQ ID NO: 5925 - DNA, 21 bp, Homo sapiens
cacactaaacttcttaacgaa

SEQ ID NO: 5926 - DNA, 21 bp, Homo sapiens
tcacctggtatccattataaa

SEQ ID NO: 5927 - DNA, 21 bp, Homo sapiens
cacgggcaacagtatttatga

SEQ ID NO: 5928 - DNA, 21 bp, Homo sapiens
tagcagctcgtctccagctaa

SEQ ID NO: 5929 - DNA, 21 bp, Homo sapiens
ccggcaaatgcgcacgaccta

SEQ ID NO: 5930 - DNA, 21 bp, Homo sapiens
ccgtgattcttgaaaggtgta

SEQ ID NO: 5931 - DNA, 21 bp, Homo sapiens
ctggacgacgtgaaggagaaa

SEQ ID NO: 5932 - DNA, 21 bp, Homo sapiens
aaccagtaaggagacttgaaa

SEQ ID NO: 5933 - DNA, 21 bp, Homo sapiens
gcgagtgtttgtaaccatgta

SEQ ID NO: 5934 - DNA, 21 bp, Homo sapiens
ccgactttatagagcagtcaa

SEQ ID NO: 5935 - DNA, 21 bp, Homo sapiens
aggccaactattggcaacaaa

SEQ ID NO: 5936 - DNA, 21 bp, Homo sapiens
ctcaaatttagtgcgacttaa

SEQ ID NO: 5937 - DNA, 21 bp, Homo sapiens
acccttcaactgttaaaggaa

SEQ ID NO: 5938 - DNA, 21 bp, Homo sapiens
aagtgatagtgtcatgctaaa

SEQ ID NO: 5939 - DNA, 21 bp, Homo sapiens
aaggaacttcgtgacactaaa

SEQ ID NO: 5940 - DNA, 21 bp, Homo sapiens
ctggctggatcgggtaggtaa

SEQ ID NO: 5941 - DNA, 21 bp, Homo sapiens
ctggatcgggtaggtaagaat

SEQ ID NO: 5942 - DNA, 21 bp, Homo sapiens
cccggtactttattctaagaa

SEQ ID NO: 5943 - DNA, 21 bp, Homo sapiens
ctccggcagttgggaagcaaa

SEQ ID NO: 5944 - DNA, 21 bp, Homo sapiens
caggacccttgcaccaccata

SEQ ID NO: 5945 - DNA, 21 bp, Homo sapiens
cagagtctgtccaggaaacaa

SEQ ID NO: 5946 - DNA, 21 bp, Homo sapiens
aacaaattccatcacagtcta

SEQ ID NO: 5947 - DNA, 21 bp, Homo sapiens
ctggattatgaggaatggata

SEQ ID NO: 5948 - DNA, 21 bp, Homo sapiens
ccggtcctgtaccgtcctcaa

SEQ ID NO: 5949 - DNA, 21 bp, Homo sapiens
cagcctttcgctcatactcta

SEQ ID NO: 5950 - DNA, 21 bp, Homo sapiens
cacgctgccgctgatgatgaa

SEQ ID NO: 5951 - DNA, 21 bp, Homo sapiens
ccggaacatgttcccagccaa

SEQ ID NO: 5952 - DNA, 21 bp, Homo sapiens
cacgttaaggtcaagacacta

SEQ ID NO: 5953 - DNA, 21 bp, Homo sapiens
tgggttatcagttaacattaa

SEQ ID NO: 5954 - DNA, 21 bp, Homo sapiens
atggtgtgttcctaacataaa

SEQ ID NO: 5955 - DNA, 21 bp, Homo sapiens
cagactttagcttacagtcaa

SEQ ID NO: 5956 - DNA, 21 bp, Homo sapiens
cagggtgctaacgtatctcta

SEQ ID NO: 5957 - DNA, 21 bp, Homo sapiens
caggatcggttctttcatctt

SEQ ID NO: 5958 - DNA, 21 bp, Homo sapiens
aagggccatgctggtcaacaa

SEQ ID NO: 5959 - DNA, 21 bp, Homo sapiens
acgctgctgcctcctatgaaa

SEQ ID NO: 5960 - DNA, 21 bp, Homo sapiens
caccttggactcctcccacaa

SEQ ID NO: 5961 - DNA, 21 bp, Homo sapiens
aaccatagtgtctgatggcaa

SEQ ID NO: 5962 - DNA, 21 bp, Homo sapiens
ttgggatttcacgtatgatta

SEQ ID NO: 5963 - DNA, 21 bp, Homo sapiens
aaggagaccattgaaatagaa

SEQ ID NO: 5964 - DNA, 21 bp, Homo sapiens
gaggacagtgttgaacgtcaa

SEQ ID NO: 5965 - DNA, 21 bp, Homo sapiens
cacattcaccatcgagatcaa

SEQ ID NO: 5966 - DNA, 21 bp, Homo sapiens
cagcaccatgatgcaaaccaa

SEQ ID NO: 5967 - DNA, 21 bp, Homo sapiens
cggaattatctgcaccttcta

SEQ ID NO: 5968 - DNA, 21 bp, Homo sapiens
acccaggaaactcgtgattat

SEQ ID NO: 5969 - DNA, 21 bp, Homo sapiens
cagcttctatgccatctccta

SEQ ID NO: 5970 - DNA, 21 bp, Homo sapiens
ctggattgccttgtatgcaaa

SEQ ID NO: 5971 - DNA, 21 bp, Homo sapiens
cagcaaggaggcctacatcta

SEQ ID NO: 5972 - DNA, 21 bp, Homo sapiens
atccttaataactatggtaaa

SEQ ID NO: 5973 - DNA, 21 bp, Homo sapiens
cacgtaaggtctcatttgata

SEQ ID NO: 5974 - DNA, 21 bp, Homo sapiens
cgggcgttatgtaagtttcta

SEQ ID NO: 5975 - DNA, 21 bp, Homo sapiens
cccgctctccaagatgaagaa

SEQ ID NO: 5976 - DNA, 21 bp, Homo sapiens
ttggttcattgttaataaata

SEQ ID NO: 5977 - DNA, 21 bp, Homo sapiens
cctggtgtatagcatcgtcaa

SEQ ID NO: 5978 - DNA, 21 bp, Homo sapiens
cacgtttcaccagaacatcta

SEQ ID NO: 5979 - DNA, 21 bp, Homo sapiens
cagcacccaatagactattta

SEQ ID NO: 5980 - DNA, 21 bp, Homo sapiens
acggatctggatatacactat

SEQ ID NO: 5981 - DNA, 21 bp, Homo sapiens
acgcttatgactcctaatgta

SEQ ID NO: 5982 - DNA, 21 bp, Homo sapiens
gagggttggtttattatcaaa

SEQ ID NO: 5983 - DNA, 21 bp, Homo sapiens
cacggtggataaactcatcaa

SEQ ID NO: 5984 - DNA, 21 bp, Homo sapiens
ctggaatgagacggtgtccaa

SEQ ID NO: 5985 - DNA, 21 bp, Homo sapiens
cagcaccgacaacgtggtcaa

SEQ ID NO: 5986 - DNA, 21 bp, Homo sapiens
cccgttcatctggacctggaa

SEQ ID NO: 5987 - DNA, 21 bp, Homo sapiens
tgcgcagaatttcaccatcaa

SEQ ID NO: 5988 - DNA, 21 bp, Homo sapiens
caccaccatcatcgtagtgtt

SEQ ID NO: 5989 - DNA, 21 bp, Homo sapiens
acggagtcagccggagaacaa

SEQ ID NO: 5990 - DNA, 21 bp, Homo sapiens
caccatagggatcgtcctcaa

SEQ ID NO: 5991 - DNA, 21 bp, Homo sapiens
agggatcgtcctcaaatccaa

SEQ ID NO: 5992 - DNA, 21 bp, Homo sapiens
cacaagtgctgtagaattaaa

SEQ ID NO: 5993 - DNA, 21 bp, Homo sapiens
caggattgtctacttcagcaa

SEQ ID NO: 5994 - DNA, 21 bp, Homo sapiens
aacgttaatgacactatcgta

SEQ ID NO: 5995 - DNA, 21 bp, Homo sapiens
caggatttacaccactaattt

SEQ ID NO: 5996 - DNA, 21 bp, Homo sapiens
cagagtattcattggtggaaa

SEQ ID NO: 5997 - DNA, 21 bp, Homo sapiens
atcgctgagctcaacaccata

SEQ ID NO: 5998 - DNA, 21 bp, Homo sapiens
cccggccacagtggaagacta

SEQ ID NO: 5999 - DNA, 21 bp, Homo sapiens
caagaagaccatagacatcta

SEQ ID NO: 6000 - DNA, 21 bp, Homo sapiens
caggatggaccaggagagaaa

SEQ ID NO: 6001 - DNA, 21 bp, Homo sapiens
ccgggagctggtgcacattaa

SEQ ID NO: 6002 - DNA, 21 bp, Homo sapiens
ccggcatgatctacaaataca

SEQ ID NO: 6003 - DNA, 21 bp, Homo sapiens
ccggatgtatgcaacccagaa

SEQ ID NO: 6004 - DNA, 21 bp, Homo sapiens
cagcattgtcttgctgccaaa

SEQ ID NO: 6005 - DNA, 21 bp, Homo sapiens
cacgtctggcatagccatgat

SEQ ID NO: 6006 - DNA, 21 bp, Homo sapiens
caccattgccacgtggatgaa

SEQ ID NO: 6007 - DNA, 21 bp, Homo sapiens
ctgcttgatgagccaccgcaa

SEQ ID NO: 6008 - DNA, 21 bp, Homo sapiens
tacggagagcgaagacgtgaa

SEQ ID NO: 6009 - DNA, 21 bp, Homo sapiens
caagcgcagcctcttcttcaa

SEQ ID NO: 6010 - DNA, 21 bp, Homo sapiens
ccgcaagcagttccagttata

SEQ ID NO: 6011 - DNA, 21 bp, Homo sapiens
aaggaggtcattcatcaacaa

SEQ ID NO: 6012 - DNA, 21 bp, Homo sapiens
aacctttattctattatatta

SEQ ID NO: 6013 - DNA, 21 bp, Homo sapiens
aaggaacttatgggcatatta

SEQ ID NO: 6014 - DNA, 21 bp, Homo sapiens
atcaattatatccatgcttaa

SEQ ID NO: 6015 - DNA, 21 bp, Homo sapiens
gagggaaagattagctttgaa

SEQ ID NO: 6016 - DNA, 21 bp, Homo sapiens
taccacaaatgcaataataca

SEQ ID NO: 6017 - DNA, 21 bp, Homo sapiens
ccgaagccaaatgacaaataa

SEQ ID NO: 6018 - DNA, 21 bp, Homo sapiens
cacactgagtgacgcaatcaa

SEQ ID NO: 6019 - DNA, 21 bp, Homo sapiens
aagaagtatatacaagctgaa

SEQ ID NO: 6020 - DNA, 21 bp, Homo sapiens
ccgaaagaagatttcagccaa

SEQ ID NO: 6021 - DNA, 21 bp, Homo sapiens
aagcactgtggcaatatatta

SEQ ID NO: 6022 - DNA, 21 bp, Homo sapiens
tccaaatatgatgccactaaa

SEQ ID NO: 6023 - DNA, 21 bp, Homo sapiens
gtggcagtatgtgaagaccaa

SEQ ID NO: 6024 - DNA, 21 bp, Homo sapiens
caggactcccatgacaaggaa

SEQ ID NO: 6025 - DNA, 21 bp, Homo sapiens
ctcaaggtgatgacagatgta

SEQ ID NO: 6026 - DNA, 21 bp, Homo sapiens
cagtcgctacttctactgcaa

SEQ ID NO: 6027 - DNA, 21 bp, Homo sapiens
ccgcattgactacgtgcttta

SEQ ID NO: 6028 - DNA, 21 bp, Homo sapiens
caggaggtcaatggcttatat

SEQ ID NO: 6029 - DNA, 21 bp, Homo sapiens
aagatgctgggaagtggttaa

SEQ ID NO: 6030 - DNA, 21 bp, Homo sapiens
cagagctcacgttgcattgaa

SEQ ID NO: 6031 - DNA, 21 bp, Homo sapiens
aagattaagttataccagcaa

SEQ ID NO: 6032 - DNA, 21 bp, Homo sapiens
aaggttgtacatagtggtcat

SEQ ID NO: 6033 - DNA, 21 bp, Homo sapiens
acccaccatggatgtcttcaa

SEQ ID NO: 6034 - DNA, 21 bp, Homo sapiens
aagaccaaggagaatgttgta

SEQ ID NO: 6035 - DNA, 21 bp, Homo sapiens
aactggaaatagcgaaataaa

SEQ ID NO: 6036 - DNA, 21 bp, Homo sapiens
cacgggcaccctggacgccaa

SEQ ID NO: 6037 - DNA, 21 bp, Homo sapiens
cgagagtgaattatgacacaa

SEQ ID NO: 6038 - DNA, 21 bp, Homo sapiens
ctccggagaatgggtatttga

SEQ ID NO: 6039 - DNA, 21 bp, Homo sapiens
ccggagagagtttgaggtgta

SEQ ID NO: 6040 - DNA, 21 bp, Homo sapiens
aagattgagcggcgacagcaa

SEQ ID NO: 6041 - DNA, 21 bp, Homo sapiens
tagccttgtttgtgttagcaa

SEQ ID NO: 6042 - DNA, 21 bp, Homo sapiens
tccactcactatgctaccaaa

SEQ ID NO: 6043 - DNA, 21 bp, Homo sapiens
cagcattgttgaaatgcttaa

SEQ ID NO: 6044 - DNA, 21 bp, Homo sapiens
agccttgtttgtgttagcaaa

SEQ ID NO: 6045 - DNA, 21 bp, Homo sapiens
atgaaactggtttataataaa

SEQ ID NO: 6046 - DNA, 21 bp, Homo sapiens
ctggtttataataaactctta

SEQ ID NO: 6047 - DNA, 21 bp, Homo sapiens
aacgctgagtattcgaggaaa

SEQ ID NO: 6048 - DNA, 21 bp, Homo sapiens
acagttctatgtactgagaaa

SEQ ID NO: 6049 - DNA, 21 bp, Homo sapiens
taggctaaacttaacaatata

SEQ ID NO: 6050 - DNA, 21 bp, Homo sapiens
cagagctgtctatttagtata

SEQ ID NO: 6051 - DNA, 21 bp, Homo sapiens
aacggagagcgtagtgaccat

SEQ ID NO: 6052 - DNA, 21 bp, Homo sapiens
cgcggaggaaacgggagtgaa

SEQ ID NO: 6053 - DNA, 21 bp, Homo sapiens
caagaggaagaggacgtggaa

SEQ ID NO: 6054 - DNA, 21 bp, Homo sapiens
cagctcagctttaacaacaca

SEQ ID NO: 6055 - DNA, 21 bp, Homo sapiens
acccatgttaaagagcatgaa

SEQ ID NO: 6056 - DNA, 21 bp, Homo sapiens
aaggactttgtgttcatttga

SEQ ID NO: 6057 - DNA, 21 bp, Homo sapiens
gccagtgatggtgaaacttaa

SEQ ID NO: 6058 - DNA, 21 bp, Homo sapiens
aaggtgtaataatgtccttta

SEQ ID NO: 6059 - DNA, 21 bp, Homo sapiens
cagaaagatcaagccaaagaa

SEQ ID NO: 6060 - DNA, 21 bp, Homo sapiens
ttggatttggtggaacagcaa

SEQ ID NO: 6061 - DNA, 21 bp, Homo sapiens
caccgtatttcaagaactcta

SEQ ID NO: 6062 - DNA, 21 bp, Homo sapiens
ccggaacttcagcgaggccaa

SEQ ID NO: 6063 - DNA, 21 bp, Homo sapiens
caggaattaaataaagcatca

SEQ ID NO: 6064 - DNA, 21 bp, Homo sapiens
tagactgaatgctataatcaa

SEQ ID NO: 6065 - DNA, 21 bp, Homo sapiens
aaccatctaaataaaccacta

SEQ ID NO: 6066 - DNA, 21 bp, Homo sapiens
agggaagagattgaagaagaa

SEQ ID NO: 6067 - DNA, 21 bp, Homo sapiens
ctggaatggatgagcacccaa

SEQ ID NO: 6068 - DNA, 21 bp, Homo sapiens
aagggctgctatgattgagaa

SEQ ID NO: 6069 - DNA, 21 bp, Homo sapiens
ctccttcatctctttaataat

SEQ ID NO: 6070 - DNA, 21 bp, Homo sapiens
aacctttgtgttacagattaa

SEQ ID NO: 6071 - DNA, 21 bp, Homo sapiens
atgatgttgatttatctttaa

SEQ ID NO: 6072 - DNA, 21 bp, Homo sapiens
cagaatcttcaattacgttaa

SEQ ID NO: 6073 - DNA, 21 bp, Homo sapiens
caagacggtcattgtcagtaa

SEQ ID NO: 6074 - DNA, 21 bp, Homo sapiens
cacgtcctttcttgacctcta

SEQ ID NO: 6075 - DNA, 21 bp, Homo sapiens
ctgggatttatcggagcaata

SEQ ID NO: 6076 - DNA, 21 bp, Homo sapiens
tacggacaggttagtctgaat

SEQ ID NO: 6077 - DNA, 21 bp, Homo sapiens
tacggcattatgaaattacaa

SEQ ID NO: 6078 - DNA, 21 bp, Homo sapiens
catgaacttagtgtaaagtta

SEQ ID NO: 6079 - DNA, 21 bp, Homo sapiens
tgggttgaatccatcactaaa

SEQ ID NO: 6080 - DNA, 21 bp, Homo sapiens
acgagtagaatcagatatcaa

SEQ ID NO: 6081 - DNA, 21 bp, Homo sapiens
caacgttaagatgaaattata

SEQ ID NO: 6082 - DNA, 21 bp, Homo sapiens
ttgggttggtttgttaattta

SEQ ID NO: 6083 - DNA, 21 bp, Homo sapiens
ccgcgagaaacttgcattgga

SEQ ID NO: 6084 - DNA, 21 bp, Homo sapiens
tcctttctacttgtcgctaaa

SEQ ID NO: 6085 - DNA, 21 bp, Homo sapiens
cacggtcaaactgaaatggat

SEQ ID NO: 6086 - DNA, 21 bp, Homo sapiens
aaggacagacgaagagtttaa

SEQ ID NO: 6087 - DNA, 21 bp, Homo sapiens
accgaagaaagagaggaccaa

SEQ ID NO: 6088 - DNA, 21 bp, Homo sapiens
tcgtgtgatcagtgtgctaaa

SEQ ID NO: 6089 - DNA, 21 bp, Homo sapiens
atgggagtaaacaatagtcta

SEQ ID NO: 6090 - DNA, 21 bp, Homo sapiens
cagcccactgacagaccttaa

SEQ ID NO: 6091 - DNA, 21 bp, Homo sapiens
aaaggtttctatggtactaaa

SEQ ID NO: 6092 - DNA, 21 bp, Homo sapiens
ttagagcattatgaacattaa

SEQ ID NO: 6093 - DNA, 21 bp, Homo sapiens
cacgatgctagtagacgccta

SEQ ID NO: 6094 - DNA, 21 bp, Homo sapiens
tgcccttagtttactggttaa

SEQ ID NO: 6095 - DNA, 21 bp, Homo sapiens
aacgttattgatacttggata

SEQ ID NO: 6096 - DNA, 21 bp, Homo sapiens
tcaggttaatactatcttaaa

SEQ ID NO: 6097 - DNA, 21 bp, Homo sapiens
ttcaataacaagtgaccctaa

SEQ ID NO: 6098 - DNA, 21 bp, Homo sapiens
atggttcatataggacacaca

SEQ ID NO: 6099 - DNA, 21 bp, Homo sapiens
aagggtgtttgtagagttgtt

SEQ ID NO: 6100 - DNA, 21 bp, Homo sapiens
cccaatggcctttatcatcta

SEQ ID NO: 6101 - DNA, 21 bp, Homo sapiens
caggaaaggctgctcgtgata

SEQ ID NO: 6102 - DNA, 21 bp, Homo sapiens
cacgtggacttctatgacaaa

SEQ ID NO: 6103 - DNA, 21 bp, Homo sapiens
aactgctgagcttactggaaa

SEQ ID NO: 6104 - DNA, 21 bp, Homo sapiens
aaggaaaggctgctcgtgata

SEQ ID NO: 6105 - DNA, 21 bp, Homo sapiens
gagacttaagatgaaagcaaa

SEQ ID NO: 6106 - DNA, 21 bp, Homo sapiens
aaggtcttagtaccagagcta

SEQ ID NO: 6107 - DNA, 21 bp, Homo sapiens
atgatgatccctgacagcaaa

SEQ ID NO: 6108 - DNA, 21 bp, Homo sapiens
accaagaaaggataaggatat

SEQ ID NO: 6109 - DNA, 21 bp, Homo sapiens
ctgccgcatcaccgatctcta

SEQ ID NO: 6110 - DNA, 21 bp, Homo sapiens
acggcccgcaaggacaatata

SEQ ID NO: 6111 - DNA, 21 bp, Homo sapiens
cactctctggatcaacgacaa

SEQ ID NO: 6112 - DNA, 21 bp, Homo sapiens
caggatgtctcctatgatgaa

SEQ ID NO: 6113 - DNA, 21 bp, Homo sapiens
ccggctcatctcggacatcaa

SEQ ID NO: 6114 - DNA, 21 bp, Homo sapiens
cagcgtcaacatcctgctcaa

SEQ ID NO: 6115 - DNA, 21 bp, Homo sapiens
ctccggaaatttgaagagtat

SEQ ID NO: 6116 - DNA, 21 bp, Homo sapiens
cgggcatcggtgcttaattta

SEQ ID NO: 6117 - DNA, 21 bp, Homo sapiens
atccattcagatcatatccta

SEQ ID NO: 6118 - DNA, 21 bp, Homo sapiens
gaggcttatttgaatacgtaa

SEQ ID NO: 6119 - DNA, 21 bp, Homo sapiens
caaagaatactccacacataa

SEQ ID NO: 6120 - DNA, 21 bp, Homo sapiens
tacattataagcttaactata

SEQ ID NO: 6121 - DNA, 21 bp, Homo sapiens
caggctgtgaattcaattgca

SEQ ID NO: 6122 - DNA, 21 bp, Homo sapiens
aggattcaccttagaagttta

SEQ ID NO: 6123 - DNA, 21 bp, Homo sapiens
cagggtcctccagctagatta

SEQ ID NO: 6124 - DNA, 21 bp, Homo sapiens
atggcaaatggttatatcaca

SEQ ID NO: 6125 - DNA, 21 bp, Homo sapiens
ctgggtagtagcgttggtaat

SEQ ID NO: 6126 - DNA, 21 bp, Homo sapiens
tagtgttacttggatagctta

SEQ ID NO: 6127 - DNA, 21 bp, Homo sapiens
atgggattcaataatatgtaa

SEQ ID NO: 6128 - DNA, 21 bp, Homo sapiens
atggatagtatgaatgatcaa

SEQ ID NO: 6129 - DNA, 21 bp, Homo sapiens
cacccttggcttaactcctaa

SEQ ID NO: 6130 - DNA, 21 bp, Homo sapiens
aagcaatagactagaactgaa

SEQ ID NO: 6131 - DNA, 21 bp, Homo sapiens
taccatgtgatccgaaagtta

SEQ ID NO: 6132 - DNA, 21 bp, Homo sapiens
cagactcttgtacacctataa

SEQ ID NO: 6133 - DNA, 21 bp, Homo sapiens
cagcgttgagttgccctgtaa

SEQ ID NO: 6134 - DNA, 21 bp, Homo sapiens
agcgttgagttgccctgtaaa

SEQ ID NO: 6135 - DNA, 21 bp, Homo sapiens
ccggcagcgctttctgctcaa

SEQ ID NO: 6136 - DNA, 21 bp, Homo sapiens
cagagcatacctggaaatgaa

SEQ ID NO: 6137 - DNA, 21 bp, Homo sapiens
caggatggatatgtatggcaa

SEQ ID NO: 6138 - DNA, 21 bp, Homo sapiens
ctgagggagtatcgaaagaaa

SEQ ID NO: 6139 - DNA, 21 bp, Homo sapiens
caggtgctttccagactccaa

SEQ ID NO: 6140 - DNA, 21 bp, Homo sapiens
cccagtgtctattctgggtta

SEQ ID NO: 6141 - DNA, 21 bp, Homo sapiens
cacctcggcaacaattactta

SEQ ID NO: 6142 - DNA, 21 bp, Homo sapiens
caaagggtatcttaaatgcaa

SEQ ID NO: 6143 - DNA, 21 bp, Homo sapiens
tgcagagatctgctaactcaa

SEQ ID NO: 6144 - DNA, 21 bp, Homo sapiens
cagcgagacccttgcattaga

SEQ ID NO: 6145 - DNA, 21 bp, Homo sapiens
cccttgcattagaaactgaaa

SEQ ID NO: 6146 - DNA, 21 bp, Homo sapiens
acggagaatgatgccctggaa

SEQ ID NO: 6147 - DNA, 21 bp, Homo sapiens
ctggtggtgcctattaatcat

SEQ ID NO: 6148 - DNA, 21 bp, Homo sapiens
tgggaactctatggtcatcta

SEQ ID NO: 6149 - DNA, 21 bp, Homo sapiens
cgcgctggtggtgcctattaa

SEQ ID NO: 6150 - DNA, 21 bp, Homo sapiens
cacgaactcattaacaactca

SEQ ID NO: 6151 - DNA, 21 bp, Homo sapiens
caccgtcaacatcgtcaacct

SEQ ID NO: 6152 - DNA, 21 bp, Homo sapiens
acgggcttatgcagaccagca

SEQ ID NO: 6153 - DNA, 21 bp, Homo sapiens
cgggcttatgcagaccagcaa

SEQ ID NO: 6154 - DNA, 21 bp, Homo sapiens
cgggaacacgctggtcatcta

SEQ ID NO: 6155 - DNA, 21 bp, Homo sapiens
ccacctttcatgtgtaataaa

SEQ ID NO: 6156 - DNA, 21 bp, Homo sapiens
agggcagttctgagtgtttaa

SEQ ID NO: 6157 - DNA, 21 bp, Homo sapiens
cccgaagatcatgcccaagaa

SEQ ID NO: 6158 - DNA, 21 bp, Homo sapiens
ttggtcgattcagtttgtcaa

SEQ ID NO: 6159 - DNA, 21 bp, Homo sapiens
tggaatcaagtccaacagtta

SEQ ID NO: 6160 - DNA, 21 bp, Homo sapiens
tcagaggccgttggtacttaa

SEQ ID NO: 6161 - DNA, 21 bp, Homo sapiens
ttggtacaacgtgtcaaccaa

SEQ ID NO: 6162 - DNA, 21 bp, Homo sapiens
cagcctcgatttcaagagaaa

SEQ ID NO: 6163 - DNA, 21 bp, Homo sapiens
cacccttgagagcatatatca

SEQ ID NO: 6164 - DNA, 21 bp, Homo sapiens
aaccaagacaacaatgccaaa

SEQ ID NO: 6165 - DNA, 21 bp, Homo sapiens
caggatggctctccacagata

SEQ ID NO: 6166 - DNA, 21 bp, Homo sapiens
acggataggcaggaacataca

SEQ ID NO: 6167 - DNA, 21 bp, Homo sapiens
cagaccatgattgaacataat

SEQ ID NO: 6168 - DNA, 21 bp, Homo sapiens
cagctgcataccagtaataaa

SEQ ID NO: 6169 - DNA, 21 bp, Homo sapiens
cggcgcctaagagtaaactaa

SEQ ID NO: 6170 - DNA, 21 bp, Homo sapiens
ccggcgcctaagagtaaacta

SEQ ID NO: 6171 - DNA, 21 bp, Homo sapiens
tagcatgtgtgtaaactttaa

SEQ ID NO: 6172 - DNA, 21 bp, Homo sapiens
gagggtttaactcctatttaa

SEQ ID NO: 6173 - DNA, 21 bp, Homo sapiens
cacgtgctctacctccattta

SEQ ID NO: 6174 - DNA, 21 bp, Homo sapiens
caccttcggcatcctaatatt

SEQ ID NO: 6175 - DNA, 21 bp, Homo sapiens
tgcagaatgtatataacgcaa

SEQ ID NO: 6176 - DNA, 21 bp, Homo sapiens
cagaatgtatataacgcaata

SEQ ID NO: 6177 - DNA, 21 bp, Homo sapiens
cagctcaaactgatgaagaaa

SEQ ID NO: 6178 - DNA, 21 bp, Homo sapiens
cacggaattagagaacctgga

SEQ ID NO: 6179 - DNA, 21 bp, Homo sapiens
aacgtgaagaaggaaattcaa

SEQ ID NO: 6180 - DNA, 21 bp, Homo sapiens
ccgcccaaatttggcaataaa

SEQ ID NO: 6181 - DNA, 21 bp, Homo sapiens
gagggccgtcaagatcctcaa

SEQ ID NO: 6182 - DNA, 21 bp, Homo sapiens
caggagtgtgcggtcaatatt

SEQ ID NO: 6183 - DNA, 21 bp, Homo sapiens
cacgtcgttcaaggagatgaa

SEQ ID NO: 6184 - DNA, 21 bp, Homo sapiens
aagaggctccagaataaagta

SEQ ID NO: 6185 - DNA, 21 bp, Homo sapiens
aggaagctgatgagaactata

SEQ ID NO: 6186 - DNA, 21 bp, Homo sapiens
cagctcggacgaagaggacaa

SEQ ID NO: 6187 - DNA, 21 bp, Homo sapiens
tccggacaattcggcagacta

SEQ ID NO: 6188 - DNA, 21 bp, Homo sapiens
aagcgaggtgtttgtgtccaa

SEQ ID NO: 6189 - DNA, 21 bp, Homo sapiens
cagtggaaattgaagagctaa

SEQ ID NO: 6190 - DNA, 21 bp, Homo sapiens
cagcaagactgtcagcctcaa

SEQ ID NO: 6191 - DNA, 21 bp, Homo sapiens
aagtccctctttgatgataaa

SEQ ID NO: 6192 - DNA, 21 bp, Homo sapiens
atcaatagcctcaacaaacaa

SEQ ID NO: 6193 - DNA, 21 bp, Homo sapiens
ccggaagggctttctgttcaa

SEQ ID NO: 6194 - DNA, 21 bp, Homo sapiens
cagaacaacatccatgtgaaa

SEQ ID NO: 6195 - DNA, 21 bp, Homo sapiens
taggagcatctttgaaatgta

SEQ ID NO: 6196 - DNA, 21 bp, Homo sapiens
cagcacaattcagaagatcaa

SEQ ID NO: 6197 - DNA, 21 bp, Homo sapiens
cacatcgaagccatgatttaa

SEQ ID NO: 6198 - DNA, 21 bp, Homo sapiens
accggttgtaaacaaacagta

SEQ ID NO: 6199 - DNA, 21 bp, Homo sapiens
caggactgatgtcaaggcata

SEQ ID NO: 6200 - DNA, 21 bp, Homo sapiens
ccgagtatttatcccgctata

SEQ ID NO: 6201 - DNA, 21 bp, Homo sapiens
atagtttacttcagctcttaa

SEQ ID NO: 6202 - DNA, 21 bp, Homo sapiens
cagctgttatttatacatata

SEQ ID NO: 6203 - DNA, 21 bp, Homo sapiens
tcccttcatttgcatctgcta

SEQ ID NO: 6204 - DNA, 21 bp, Homo sapiens
cccattagttcttgtatcaca

SEQ ID NO: 6205 - DNA, 21 bp, Homo sapiens
ccagatggttcgactgcataa

SEQ ID NO: 6206 - DNA, 21 bp, Homo sapiens
atggttcgactgcataagaaa

SEQ ID NO: 6207 - DNA, 21 bp, Homo sapiens
ccagctggtcgctatctataa

SEQ ID NO: 6208 - DNA, 21 bp, Homo sapiens
ctcactggaatccatatacaa

SEQ ID NO: 6209 - DNA, 21 bp, Homo sapiens
cagggagatcttaatacctaa

SEQ ID NO: 6210 - DNA, 21 bp, Homo sapiens
ctgcactgtattaaacatgta

SEQ ID NO: 6211 - DNA, 21 bp, Homo sapiens
aagcataagcatgacagtaaa

SEQ ID NO: 6212 - DNA, 21 bp, Homo sapiens
tagaatcaagttgaacagcaa

SEQ ID NO: 6213 - DNA, 21 bp, Homo sapiens
tagggtgatattggtgcatgt

SEQ ID NO: 6214 - DNA, 21 bp, Homo sapiens
gcccttgtaagctatactgta

SEQ ID NO: 6215 - DNA, 21 bp, Homo sapiens
gaccaggaagatcttcacaaa

SEQ ID NO: 6216 - DNA, 21 bp, Homo sapiens
cagaactctgcttgagaacta

SEQ ID NO: 6217 - DNA, 21 bp, Homo sapiens
cccactcaccctccagacaaa

SEQ ID NO: 6218 - DNA, 21 bp, Homo sapiens
aaacgcttcgcctggcaatga

SEQ ID NO: 6219 - DNA, 21 bp, Homo sapiens
caggaccaggtgaacaacaaa

SEQ ID NO: 6220 - DNA, 21 bp, Homo sapiens
cctgctttcctttatgatcta

SEQ ID NO: 6221 - DNA, 21 bp, Homo sapiens
tagcgacattggtaacagcta

SEQ ID NO: 6222 - DNA, 21 bp, Homo sapiens
ccctatgaggttggttattat

SEQ ID NO: 6223 - DNA, 21 bp, Homo sapiens
ttcgctagtgatggacccata

SEQ ID NO: 6224 - DNA, 21 bp, Homo sapiens
ctcgggcaaatataatggcta

SEQ ID NO: 6225 - DNA, 21 bp, Homo sapiens
tcgggcaaatataatggctat

SEQ ID NO: 6226 - DNA, 21 bp, Homo sapiens
caagctattgacctttgttta

SEQ ID NO: 6227 - DNA, 21 bp, Homo sapiens
acgatagttactcacaagtaa

SEQ ID NO: 6228 - DNA, 21 bp, Homo sapiens
cagccacaaacaagtacttta

SEQ ID NO: 6229 - DNA, 21 bp, Homo sapiens
cactatggtcttagtgaacta

SEQ ID NO: 6230 - DNA, 21 bp, Homo sapiens
caccctattatccaaattgat

SEQ ID NO: 6231 - DNA, 21 bp, Homo sapiens
accctattatccaaattgata

SEQ ID NO: 6232 - DNA, 21 bp, Homo sapiens
tagggaaagttgtgaacccaa

SEQ ID NO: 6233 - DNA, 21 bp, Homo sapiens
aaggcggatgtttcccagtta

SEQ ID NO: 6234 - DNA, 21 bp, Homo sapiens
gccgacgatcacagatacaaa

SEQ ID NO: 6235 - DNA, 21 bp, Homo sapiens
ccacaagatcacgcaattaaa

SEQ ID NO: 6236 - DNA, 21 bp, Homo sapiens
taccattgtaccaagaggaaa

SEQ ID NO: 6237 - DNA, 21 bp, Homo sapiens
cccaataagaaccgagacgaa

SEQ ID NO: 6238 - DNA, 21 bp, Homo sapiens
ccggagaccttcaaccctgaa

SEQ ID NO: 6239 - DNA, 21 bp, Homo sapiens
accgctgcagctagaatccaa

SEQ ID NO: 6240 - DNA, 21 bp, Homo sapiens
ccgctgcagctagaatccaaa

SEQ ID NO: 6241 - DNA, 21 bp, Homo sapiens
ccgagattcctgaattcccaa

SEQ ID NO: 6242 - DNA, 21 bp, Homo sapiens
aaagttgaaatttgtttgcta

SEQ ID NO: 6243 - DNA, 21 bp, Homo sapiens
tacctgtagttcagttagtaa

SEQ ID NO: 6244 - DNA, 21 bp, Homo sapiens
tgcgaacttcttagattgtta

SEQ ID NO: 6245 - DNA, 21 bp, Homo sapiens
tagcatctttgtaaactataa

SEQ ID NO: 6246 - DNA, 21 bp, Homo sapiens
tacaatcatgtattaattgaa

SEQ ID NO: 6247 - DNA, 21 bp, Homo sapiens
gcgaatgtttcctccatttaa

SEQ ID NO: 6248 - DNA, 21 bp, Homo sapiens
gtgcactttgtcggatataaa

SEQ ID NO: 6249 - DNA, 21 bp, Homo sapiens
tcgggacaagtgaacacatta

SEQ ID NO: 6250 - DNA, 21 bp, Homo sapiens
ctgcctatagagatatattca

SEQ ID NO: 6251 - DNA, 21 bp, Homo sapiens
cagccgagccatggtttctaa

SEQ ID NO: 6252 - DNA, 21 bp, Homo sapiens
caggagtagctgagctcacaa

SEQ ID NO: 6253 - DNA, 21 bp, Homo sapiens
caggacaagcatggtcccaca

SEQ ID NO: 6254 - DNA, 21 bp, Homo sapiens
gcgagtggcacgtttatttaa

SEQ ID NO: 6255 - DNA, 21 bp, Homo sapiens
cacggatcttatctggtttaa

SEQ ID NO: 6256 - DNA, 21 bp, Homo sapiens
ctgggatatgctagtgatgta

SEQ ID NO: 6257 - DNA, 21 bp, Homo sapiens
gcggtgtaataagatcctata

SEQ ID NO: 6258 - DNA, 21 bp, Homo sapiens
taaggttataactgtggctaa

SEQ ID NO: 6259 - DNA, 21 bp, Homo sapiens
ctcggtcatcctgaacttgga

SEQ ID NO: 6260 - DNA, 21 bp, Homo sapiens
ctggatgattgggactttaaa

SEQ ID NO: 6261 - DNA, 21 bp, Homo sapiens
ccgggcacatgtgaaaggtat

SEQ ID NO: 6262 - DNA, 21 bp, Homo sapiens
cccggatcactcaagcaataa

SEQ ID NO: 6263 - DNA, 21 bp, Homo sapiens
tacgaacatttcaacagccca

SEQ ID NO: 6264 - DNA, 21 bp, Homo sapiens
atgagctggtttgtcaaacaa

SEQ ID NO: 6265 - DNA, 21 bp, Homo sapiens
aacagaaataatctgacacta

SEQ ID NO: 6266 - DNA, 21 bp, Homo sapiens
ctgggcagcttgagagggcaa

SEQ ID NO: 6267 - DNA, 21 bp, Homo sapiens
agagagaattggtgagtttaa

SEQ ID NO: 6268 - DNA, 21 bp, Homo sapiens
tctgatatggttggtaaagaa

SEQ ID NO: 6269 - DNA, 21 bp, Homo sapiens
atggttggtaaagaaatctta

SEQ ID NO: 6270 - DNA, 21 bp, Homo sapiens
tggttggtaaagaaatcttaa

SEQ ID NO: 6271 - DNA, 21 bp, Homo sapiens
cagatcctggctaacgacaaa

SEQ ID NO: 6272 - DNA, 21 bp, Homo sapiens
ctggtccaagtgcaatatgta

SEQ ID NO: 6273 - DNA, 21 bp, Homo sapiens
caagtgcaatatgtaattata

SEQ ID NO: 6274 - DNA, 21 bp, Homo sapiens
atctttctttatattgctaaa

SEQ ID NO: 6275 - DNA, 21 bp, Homo sapiens
tacgttggtctcagaaactga

SEQ ID NO: 6276 - DNA, 21 bp, Homo sapiens
cagcgaggaatcggacagtga

SEQ ID NO: 6277 - DNA, 21 bp, Homo sapiens
caagcagtgaggaatcagata

SEQ ID NO: 6278 - DNA, 21 bp, Homo sapiens
acggttgaaggtggagatcaa

SEQ ID NO: 6279 - DNA, 21 bp, Homo sapiens
cagggcaaccttccaattcaa

SEQ ID NO: 6280 - DNA, 21 bp, Homo sapiens
taggtttaaagtggtcttgaa

SEQ ID NO: 6281 - DNA, 21 bp, Homo sapiens
ccggagtcactcatcccttaa

SEQ ID NO: 6282 - DNA, 21 bp, Homo sapiens
taggatggtaccaagcattta

SEQ ID NO: 6283 - DNA, 21 bp, Homo sapiens
tggcttgagattggtcactta

SEQ ID NO: 6284 - DNA, 21 bp, Homo sapiens
cagagatcagtcaaatccata

SEQ ID NO: 6285 - DNA, 21 bp, Homo sapiens
cgccctaactttgcttgctaa

SEQ ID NO: 6286 - DNA, 21 bp, Homo sapiens
aacatgagtagcgaacactta

SEQ ID NO: 6287 - DNA, 21 bp, Homo sapiens
aacgcttatcaacacagcaaa

SEQ ID NO: 6288 - DNA, 21 bp, Homo sapiens
atgtagtagaacaaactttaa

SEQ ID NO: 6289 - DNA, 21 bp, Homo sapiens
cccgcttctcttacagtgtga

SEQ ID NO: 6290 - DNA, 21 bp, Homo sapiens
aaccaagtgatcaaactacat

SEQ ID NO: 6291 - DNA, 21 bp, Homo sapiens
ctgcctttctatacaaagcta

SEQ ID NO: 6292 - DNA, 21 bp, Homo sapiens
ttgaattatatgttcagatta

SEQ ID NO: 6293 - DNA, 21 bp, Homo sapiens
atgggttatatcataaatgca

SEQ ID NO: 6294 - DNA, 21 bp, Homo sapiens
aaccagcacaatagcgtccaa

SEQ ID NO: 6295 - DNA, 21 bp, Homo sapiens
cacgtgcatttggcctatgta

SEQ ID NO: 6296 - DNA, 21 bp, Homo sapiens
tcaggtgaccttcgcaacaaa

SEQ ID NO: 6297 - DNA, 21 bp, Homo sapiens
ccgcagctaatcagaatcaga

SEQ ID NO: 6298 - DNA, 21 bp, Homo sapiens
cagtacaaagtcgcaatcaaa

SEQ ID NO: 6299 - DNA, 21 bp, Homo sapiens
cagcacgttgatgtgaagata

SEQ ID NO: 6300 - DNA, 21 bp, Homo sapiens
tggaatgacatcaaatttcaa

SEQ ID NO: 6301 - DNA, 21 bp, Homo sapiens
tcggtgctacttaacaactta

SEQ ID NO: 6302 - DNA, 21 bp, Homo sapiens
acgggccagattgtaagctta

SEQ ID NO: 6303 - DNA, 21 bp, Homo sapiens
aaggaattatatattcagcat

SEQ ID NO: 6304 - DNA, 21 bp, Homo sapiens
aggacgaaactcgttatcata

SEQ ID NO: 6305 - DNA, 21 bp, Homo sapiens
cacaataaagaaacaacgaaa

SEQ ID NO: 6306 - DNA, 21 bp, Homo sapiens
aagattgagatgtgttcacaa

SEQ ID NO: 6307 - DNA, 21 bp, Homo sapiens
ctggccgtatatggcaattca

SEQ ID NO: 6308 - DNA, 21 bp, Homo sapiens
taggtgaagtcgagcactcta

SEQ ID NO: 6309 - DNA, 21 bp, Homo sapiens
gtggaatttattggcagccaa

SEQ ID NO: 6310 - DNA, 21 bp, Homo sapiens
ccgcttagttcttgaattgtt

SEQ ID NO: 6311 - DNA, 21 bp, Homo sapiens
ctggtacagagaaatcgacaa

SEQ ID NO: 6312 - DNA, 21 bp, Homo sapiens
agggactacttctgaactcta

SEQ ID NO: 6313 - DNA, 21 bp, Homo sapiens
cgctacttcttaagtacttaa

SEQ ID NO: 6314 - DNA, 21 bp, Homo sapiens
aaggcagaaatgaacatgaaa

SEQ ID NO: 6315 - DNA, 21 bp, Homo sapiens
tccgggattgttgctgacata

SEQ ID NO: 6316 - DNA, 21 bp, Homo sapiens
aaggagattgatgatgtcatt

SEQ ID NO: 6317 - DNA, 21 bp, Homo sapiens
tcgcaggcgattcaacattaa

SEQ ID NO: 6318 - DNA, 21 bp, Homo sapiens
cagctccgaattcaggaacta

SEQ ID NO: 6319 - DNA, 21 bp, Homo sapiens
cacggagtggctagaaggcta

SEQ ID NO: 6320 - DNA, 21 bp, Homo sapiens
caggcacatcgggaacctcaa

SEQ ID NO: 6321 - DNA, 21 bp, Homo sapiens
gacggtcatactgtcggttaa

SEQ ID NO: 6322 - DNA, 21 bp, Homo sapiens
tggagtttcaatatcaataaa

SEQ ID NO: 6323 - DNA, 21 bp, Homo sapiens
ctaggttatttccgtgggata

SEQ ID NO: 6324 - DNA, 21 bp, Homo sapiens
cacactgcaagtggacatcaa

SEQ ID NO: 6325 - DNA, 21 bp, Homo sapiens
cagcatatatatgttcttcaa

SEQ ID NO: 6326 - DNA, 21 bp, Homo sapiens
cacgtggagctgtaccagaaa

SEQ ID NO: 6327 - DNA, 21 bp, Homo sapiens
ccgagtcggaatactatgcca

SEQ ID NO: 6328 - DNA, 21 bp, Homo sapiens
ccgggtcttgcgggtgcccaa

SEQ ID NO: 6329 - DNA, 21 bp, Homo sapiens
acgcatagactgaggtataaa

SEQ ID NO: 6330 - DNA, 21 bp, Homo sapiens
aagtatgaatattactctcaa

SEQ ID NO: 6331 - DNA, 21 bp, Homo sapiens
cgggaaggcgatcatctccaa

SEQ ID NO: 6332 - DNA, 21 bp, Homo sapiens
aaggcgatcatctccaataaa

SEQ ID NO: 6333 - DNA, 21 bp, Homo sapiens
ccgcaccataatgagatgtga

SEQ ID NO: 6334 - DNA, 21 bp, Homo sapiens
tggagaaatggcatcattata

SEQ ID NO: 6335 - DNA, 21 bp, Homo sapiens
ctgtaatgttacgtcatgaaa

SEQ ID NO: 6336 - DNA, 21 bp, Homo sapiens
tgggattgtactataccagta

SEQ ID NO: 6337 - DNA, 21 bp, Homo sapiens
tccattggtggaattcatgaa

SEQ ID NO: 6338 - DNA, 21 bp, Homo sapiens
ctgccttattatgatcttgta

SEQ ID NO: 6339 - DNA, 21 bp, Homo sapiens
taccatgactttattctggaa

SEQ ID NO: 6340 - DNA, 21 bp, Homo sapiens
tcggttaataacgacatgata

SEQ ID NO: 6341 - DNA, 21 bp, Homo sapiens
tcgctttgctgaggtctataa

SEQ ID NO: 6342 - DNA, 21 bp, Homo sapiens
ctccaatatcctcgtgaagaa

SEQ ID NO: 6343 - DNA, 21 bp, Homo sapiens
gacaatggctatagtccaata

SEQ ID NO: 6344 - DNA, 21 bp, Homo sapiens
caccttcaacatggagctata

SEQ ID NO: 6345 - DNA, 21 bp, Homo sapiens
cccgcaagctgacatggataa

SEQ ID NO: 6346 - DNA, 21 bp, Homo sapiens
acctgaaatcgtggtgtttaa

SEQ ID NO: 6347 - DNA, 21 bp, Homo sapiens
taccactgtgactgcattgaa

SEQ ID NO: 6348 - DNA, 21 bp, Homo sapiens
tacccagaggacacttgtaaa

SEQ ID NO: 6349 - DNA, 21 bp, Homo sapiens
tccaagaactataaacttaaa

SEQ ID NO: 6350 - DNA, 21 bp, Homo sapiens
cacatactgtctaattaataa

SEQ ID NO: 6351 - DNA, 21 bp, Homo sapiens
caccttgatcccaatccttat

SEQ ID NO: 6352 - DNA, 21 bp, Homo sapiens
atggcccagccttgtaaataa

SEQ ID NO: 6353 - DNA, 21 bp, Homo sapiens
ccgcaaggagcaaacactgaa

SEQ ID NO: 6354 - DNA, 21 bp, Homo sapiens
ccgcgtcgtgaccaactacaa

SEQ ID NO: 6355 - DNA, 21 bp, Homo sapiens
tgcataagccattatgataaa

SEQ ID NO: 6356 - DNA, 21 bp, Homo sapiens
atgacataagctaccgattaa

SEQ ID NO: 6357 - DNA, 21 bp, Homo sapiens
caagagagtgtcgaatgataa

SEQ ID NO: 6358 - DNA, 21 bp, Homo sapiens
agcgttgggatacttcattaa

SEQ ID NO: 6359 - DNA, 21 bp, Homo sapiens
cacgccgtgaacctacagcaa

SEQ ID NO: 6360 - DNA, 21 bp, Homo sapiens
ccgcctgggtttcctgggcaa

SEQ ID NO: 6361 - DNA, 21 bp, Homo sapiens
ctgcatggaagtgtacgagta

SEQ ID NO: 6362 - DNA, 21 bp, Homo sapiens
atcgatggctacccagaccaa

SEQ ID NO: 6363 - DNA, 21 bp, Homo sapiens
caagttgaaggtcaccctcaa

SEQ ID NO: 6364 - DNA, 21 bp, Homo sapiens
tgcggtgattctggagctgaa

SEQ ID NO: 6365 - DNA, 21 bp, Homo sapiens
caagttctacctggacctgta

SEQ ID NO: 6366 - DNA, 21 bp, Homo sapiens
cagcaaggttggcatggatta

SEQ ID NO: 6367 - DNA, 21 bp, Homo sapiens
cagcgagtttaccaagatcat

SEQ ID NO: 6368 - DNA, 21 bp, Homo sapiens
ctggcccaagctgctgatgaa

SEQ ID NO: 6369 - DNA, 21 bp, Homo sapiens
ctggatggaattgaagtgaat

SEQ ID NO: 6370 - DNA, 21 bp, Homo sapiens
cccgatgacattggccagtca

SEQ ID NO: 6371 - DNA, 21 bp, Homo sapiens
cggaagataatgggtaaggaa

SEQ ID NO: 6372 - DNA, 21 bp, Homo sapiens
cacaacaaattggccagtata

SEQ ID NO: 6373 - DNA, 21 bp, Homo sapiens
ctgggctaacagaacaactaa

SEQ ID NO: 6374 - DNA, 21 bp, Homo sapiens
aacgatttgggaggtagtgaa

SEQ ID NO: 6375 - DNA, 21 bp, Homo sapiens
cgcctgaaatttctaatagaa

SEQ ID NO: 6376 - DNA, 21 bp, Homo sapiens
aacggaaatggtagagtttca

SEQ ID NO: 6377 - DNA, 21 bp, Homo sapiens
ctggttctgtctgcccaataa

SEQ ID NO: 6378 - DNA, 21 bp, Homo sapiens
acggcgagctttaagaagaaa

SEQ ID NO: 6379 - DNA, 21 bp, Homo sapiens
ccagtgagaacgtgacgttaa

SEQ ID NO: 6380 - DNA, 21 bp, Homo sapiens
tacttgtatatcgctattgaa

SEQ ID NO: 6381 - DNA, 21 bp, Homo sapiens
gcgcttcaaggtcaatgtgaa

SEQ ID NO: 6382 - DNA, 21 bp, Homo sapiens
cccagtgagaacgtgacgtta

SEQ ID NO: 6383 - DNA, 21 bp, Homo sapiens
caggcacattatgtaaacata

SEQ ID NO: 6384 - DNA, 21 bp, Homo sapiens
ctcaaataccttcacaataaa

SEQ ID NO: 6385 - DNA, 21 bp, Homo sapiens
ctcgctggacgttggaggaaa

SEQ ID NO: 6386 - DNA, 21 bp, Homo sapiens
ctcgacatcgaggacccataa

SEQ ID NO: 6387 - DNA, 21 bp, Homo sapiens
caggtgaaagactgagatgaa

SEQ ID NO: 6388 - DNA, 21 bp, Homo sapiens
ccctgcggagtcgataaatta

SEQ ID NO: 6389 - DNA, 21 bp, Homo sapiens
cggcggcattattccctataa

SEQ ID NO: 6390 - DNA, 21 bp, Homo sapiens
cacgctggtctacaccatcaa

SEQ ID NO: 6391 - DNA, 21 bp, Homo sapiens
cccacttgtcactgacacaaa

SEQ ID NO: 6392 - DNA, 21 bp, Homo sapiens
tggcttaaatatagttcctaa

SEQ ID NO: 6393 - DNA, 21 bp, Homo sapiens
taccttgtcatcagcatgtaa

SEQ ID NO: 6394 - DNA, 21 bp, Homo sapiens
ctccgttacgtgtacatccaa

SEQ ID NO: 6395 - DNA, 21 bp, Homo sapiens
aaggtgttcaattaatctgca

SEQ ID NO: 6396 - DNA, 21 bp, Homo sapiens
ctcccgataaagaacaggaaa

SEQ ID NO: 6397 - DNA, 21 bp, Homo sapiens
cgggatcgaatattaactcca

SEQ ID NO: 6398 - DNA, 21 bp, Homo sapiens
atgccagaagtggactatgta

SEQ ID NO: 6399 - DNA, 21 bp, Homo sapiens
ccgggagaacgtgaccatcta

SEQ ID NO: 6400 - DNA, 21 bp, Homo sapiens
caggaggaaacttcacgttga

SEQ ID NO: 6401 - DNA, 21 bp, Homo sapiens
aaggttaaacatttgtataaa

SEQ ID NO: 6402 - DNA, 21 bp, Homo sapiens
tcgaatttatagaaatagaaa

SEQ ID NO: 6403 - DNA, 21 bp, Homo sapiens
ctgcattgatatttccgatta

SEQ ID NO: 6404 - DNA, 21 bp, Homo sapiens
cagcgagaagacggaaatgca

SEQ ID NO: 6405 - DNA, 21 bp, Homo sapiens
caggatcaaagacgaattcca

SEQ ID NO: 6406 - DNA, 21 bp, Homo sapiens
cacagtttatgaggtcatcta

SEQ ID NO: 6407 - DNA, 21 bp, Homo sapiens
gaggcgttattccttatgtta

SEQ ID NO: 6408 - DNA, 21 bp, Homo sapiens
cagatcgagataaccacgtaa

SEQ ID NO: 6409 - DNA, 21 bp, Homo sapiens
tagaatcaatctcgacctata

SEQ ID NO: 6410 - DNA, 21 bp, Homo sapiens
cagcattacaaggatatttga

SEQ ID NO: 6411 - DNA, 21 bp, Homo sapiens
caccatttatatgtggtatta

SEQ ID NO: 6412 - DNA, 21 bp, Homo sapiens
ctggtttggcatacaactgta

SEQ ID NO: 6413 - DNA, 21 bp, Homo sapiens
ccgcaaagttatatctatgaa

SEQ ID NO: 6414 - DNA, 21 bp, Homo sapiens
cagggtcttcatgaacactaa

SEQ ID NO: 6415 - DNA, 21 bp, Homo sapiens
ctgggcagtcttgaacattta

SEQ ID NO: 6416 - DNA, 21 bp, Homo sapiens
aacatttagacttatcctata

SEQ ID NO: 6417 - DNA, 21 bp, Homo sapiens
caggtaaagtggaaacgttaa

SEQ ID NO: 6418 - DNA, 21 bp, Homo sapiens
ccgcaactcaaagaactttat

SEQ ID NO: 6419 - DNA, 21 bp, Homo sapiens
ccggttgatgctaacactcta

SEQ ID NO: 6420 - DNA, 21 bp, Homo sapiens
tacgttatgttggagcattta

SEQ ID NO: 6421 - DNA, 21 bp, Homo sapiens
tcccgttaacatagtgctgaa

SEQ ID NO: 6422 - DNA, 21 bp, Homo sapiens
ctctatacttatggaaatgta

SEQ ID NO: 6423 - DNA, 21 bp, Homo sapiens
cacggacgctatgcagactta

SEQ ID NO: 6424 - DNA, 21 bp, Homo sapiens
aagggttgttatgatctggta

SEQ ID NO: 6425 - DNA, 21 bp, Homo sapiens
ccggttcatcacggccaatca

SEQ ID NO: 6426 - DNA, 21 bp, Homo sapiens
caggctgcctaagacatgtaa

SEQ ID NO: 6427 - DNA, 21 bp, Homo sapiens
aaggaagaaagcacatttaaa

SEQ ID NO: 6428 - DNA, 21 bp, Homo sapiens
caggtcagggagaatgtataa

SEQ ID NO: 6429 - DNA, 21 bp, Homo sapiens
ccgcatcatgccctacatcta

SEQ ID NO: 6430 - DNA, 21 bp, Homo sapiens
caccatggatatcacacatga

SEQ ID NO: 6431 - DNA, 21 bp, Homo sapiens
acccatcaaattacagtataa

SEQ ID NO: 6432 - DNA, 21 bp, Homo sapiens
gaggagaagtatgcaaagtaa

SEQ ID NO: 6433 - DNA, 21 bp, Homo sapiens
aacccaagcttagaactttaa

SEQ ID NO: 6434 - DNA, 21 bp, Homo sapiens
caagcttagaactttaagcaa

SEQ ID NO: 6435 - DNA, 21 bp, Homo sapiens
tagggtcggaacccaagctta

SEQ ID NO: 6436 - DNA, 21 bp, Homo sapiens
ccgactcagcgctgagatcaa

SEQ ID NO: 6437 - DNA, 21 bp, Homo sapiens
ctcacatacggtaaagccaaa

SEQ ID NO: 6438 - DNA, 21 bp, Homo sapiens
tgccctcttgaggtcctttaa

SEQ ID NO: 6439 - DNA, 21 bp, Homo sapiens
caggaggtgagttcctcttta

SEQ ID NO: 6440 - DNA, 21 bp, Homo sapiens
acccatgtctttctaccctaa

SEQ ID NO: 6441 - DNA, 21 bp, Homo sapiens
ctggctgtgtaacctaacata

SEQ ID NO: 6442 - DNA, 21 bp, Homo sapiens
taggagttagcgtgtttgata

SEQ ID NO: 6443 - DNA, 21 bp, Homo sapiens
ccggatgtccatggagcagaa

SEQ ID NO: 6444 - DNA, 21 bp, Homo sapiens
cagggtgatgctgaagatgat

SEQ ID NO: 6445 - DNA, 21 bp, Homo sapiens
ctcggctatgacagccatcat

SEQ ID NO: 6446 - DNA, 21 bp, Homo sapiens
cagatgtatggctaaccggaa

SEQ ID NO: 6447 - DNA, 21 bp, Homo sapiens
ccgagctgttccacttgttaa

SEQ ID NO: 6448 - DNA, 21 bp, Homo sapiens
cagcctttactcatactatta

SEQ ID NO: 6449 - DNA, 21 bp, Homo sapiens
ctggcacattagactcaagta

SEQ ID NO: 6450 - DNA, 21 bp, Homo sapiens
cccactgcatagaaataacaa

SEQ ID NO: 6451 - DNA, 21 bp, Homo sapiens
tggcgtctttacagatccaaa

SEQ ID NO: 6452 - DNA, 21 bp, Homo sapiens
aaggcggtgtgtgaatttgaa

SEQ ID NO: 6453 - DNA, 21 bp, Homo sapiens
caggcagctcctgtttggaaa

SEQ ID NO: 6454 - DNA, 21 bp, Homo sapiens
ccactccacaccagtaataaa

SEQ ID NO: 6455 - DNA, 21 bp, Homo sapiens
ccgaaacaggatcaacgataa

SEQ ID NO: 6456 - DNA, 21 bp, Homo sapiens
caggatcaacgataaccagaa

SEQ ID NO: 6457 - DNA, 21 bp, Homo sapiens
aagcgtcagaacaaagaccta

SEQ ID NO: 6458 - DNA, 21 bp, Homo sapiens
gaggagcagtacgaagaagaa

SEQ ID NO: 6459 - DNA, 21 bp, Homo sapiens
cagaaagaacttggaaggcaa

SEQ ID NO: 6460 - DNA, 21 bp, Homo sapiens
caggatggaaatccaactaat

SEQ ID NO: 6461 - DNA, 21 bp, Homo sapiens
ctcacaattcacaccaataaa

SEQ ID NO: 6462 - DNA, 21 bp, Homo sapiens
ttgggacatcatgaaagttta

SEQ ID NO: 6463 - DNA, 21 bp, Homo sapiens
tgccttcatattaatatataa

SEQ ID NO: 6464 - DNA, 21 bp, Homo sapiens
gtggaagtttactgacaggaa

SEQ ID NO: 6465 - DNA, 21 bp, Homo sapiens
cccattgtaaaggtatctaaa

SEQ ID NO: 6466 - DNA, 21 bp, Homo sapiens
cagactatagggaataccata

SEQ ID NO: 6467 - DNA, 21 bp, Homo sapiens
cacgtaggctgtttaaagaaa

SEQ ID NO: 6468 - DNA, 21 bp, Homo sapiens
acgaataaccatagaaatgaa

SEQ ID NO: 6469 - DNA, 21 bp, Homo sapiens
gtggattatgtggtagatcaa

SEQ ID NO: 6470 - DNA, 21 bp, Homo sapiens
ctgattgaagtagttaagaaa

SEQ ID NO: 6471 - DNA, 21 bp, Homo sapiens
cagccgaaagacctaaataca

SEQ ID NO: 6472 - DNA, 21 bp, Homo sapiens
tcgggctaggaaagaagtaaa

SEQ ID NO: 6473 - DNA, 21 bp, Homo sapiens
aagcagtaacacctcttacaa

SEQ ID NO: 6474 - DNA, 21 bp, Homo sapiens
ctccagaactaccgtaattat

SEQ ID NO: 6475 - DNA, 21 bp, Homo sapiens
ttgtttgaccagagcaataaa

SEQ ID NO: 6476 - DNA, 21 bp, Homo sapiens
caggacagtctttccacgaat

SEQ ID NO: 6477 - DNA, 21 bp, Homo sapiens
cccgctcttgaagaaactcta

SEQ ID NO: 6478 - DNA, 21 bp, Homo sapiens
ccgggccatgcctgtttacaa

SEQ ID NO: 6479 - DNA, 21 bp, Homo sapiens
cccgggatgctcaacaaccat

SEQ ID NO: 6480 - DNA, 21 bp, Homo sapiens
atcgagtatttcacctcccaa

SEQ ID NO: 6481 - DNA, 21 bp, Homo sapiens
cagctagaagacgaaattaca

SEQ ID NO: 6482 - DNA, 21 bp, Homo sapiens
cagcaataggatgatttacta

SEQ ID NO: 6483 - DNA, 21 bp, Homo sapiens
aaagacaatgtctaccgtaaa

SEQ ID NO: 6484 - DNA, 21 bp, Homo sapiens
cgggaggataatatcccacaa

SEQ ID NO: 6485 - DNA, 21 bp, Homo sapiens
tccatttggagtgaagtataa

SEQ ID NO: 6486 - DNA, 21 bp, Homo sapiens
cggagtattcagatcctgaaa

SEQ ID NO: 6487 - DNA, 21 bp, Homo sapiens
ccgaggatggctgaagtccaa

SEQ ID NO: 6488 - DNA, 21 bp, Homo sapiens
atggaaggcgtggtgggattt

SEQ ID NO: 6489 - DNA, 21 bp, Homo sapiens
cacactgtgctttctattgta

SEQ ID NO: 6490 - DNA, 21 bp, Homo sapiens
ctcaagggcaccgaagatgaa

SEQ ID NO: 6491 - DNA, 21 bp, Homo sapiens
tgcggagaggtcagtaactaa

SEQ ID NO: 6492 - DNA, 21 bp, Homo sapiens
aacgatatgacttccatgtaa

SEQ ID NO: 6493 - DNA, 21 bp, Homo sapiens
agcgtttgctttcgcctgtaa

SEQ ID NO: 6494 - DNA, 21 bp, Homo sapiens
atagtaattaatagatggtaa

SEQ ID NO: 6495 - DNA, 21 bp, Homo sapiens
accgaaattcctggaaccaaa

SEQ ID NO: 6496 - DNA, 21 bp, Homo sapiens
agggttcaaggtggtcccaaa

SEQ ID NO: 6497 - DNA, 21 bp, Homo sapiens
caccggttgaatggacaacta

SEQ ID NO: 6498 - DNA, 21 bp, Homo sapiens
accggttgaatggacaactaa

SEQ ID NO: 6499 - DNA, 21 bp, Homo sapiens
ctgaaggaagatctaaataaa

SEQ ID NO: 6500 - DNA, 21 bp, Homo sapiens
caggaggtttctagagaacaa

SEQ ID NO: 6501 - DNA, 21 bp, Homo sapiens
ctgagtgctggacctcattaa

SEQ ID NO: 6502 - DNA, 21 bp, Homo sapiens
ctgcctgggaccggacgtcaa

SEQ ID NO: 6503 - DNA, 21 bp, Homo sapiens
ctggacctcattaaagtgcat

SEQ ID NO: 6504 - DNA, 21 bp, Homo sapiens
caggatcatcgtgcacccaca

SEQ ID NO: 6505 - DNA, 21 bp, Homo sapiens
ctggaagattcgcgactacaa

SEQ ID NO: 6506 - DNA, 21 bp, Homo sapiens
acacttcactctgaagaatta

SEQ ID NO: 6507 - DNA, 21 bp, Homo sapiens
tccgatgatcgcgctgcagaa

SEQ ID NO: 6508 - DNA, 21 bp, Homo sapiens
agagagcatcgttaaagataa

SEQ ID NO: 6509 - DNA, 21 bp, Homo sapiens
aaggtaggctgttccagttaa

SEQ ID NO: 6510 - DNA, 21 bp, Homo sapiens
aagcatttctttagcccacaa

SEQ ID NO: 6511 - DNA, 21 bp, Homo sapiens
ctggagggtacttgctataat

SEQ ID NO: 6512 - DNA, 21 bp, Homo sapiens
agggtacttgctataatggaa

SEQ ID NO: 6513 - DNA, 21 bp, Homo sapiens
caggaaactattcaccagtta

SEQ ID NO: 6514 - DNA, 21 bp, Homo sapiens
cagcgctgtgcaaactatata

SEQ ID NO: 6515 - DNA, 21 bp, Homo sapiens
cagggatgagtttaaacccta

SEQ ID NO: 6516 - DNA, 21 bp, Homo sapiens
agggatgagtttaaaccctaa

SEQ ID NO: 6517 - DNA, 21 bp, Homo sapiens
cagagctatcgatgagcctaa

SEQ ID NO: 6518 - DNA, 21 bp, Homo sapiens
gaggcctgttctcaaagtgaa

SEQ ID NO: 6519 - DNA, 21 bp, Homo sapiens
cacactaagtccatcttacaa

SEQ ID NO: 6520 - DNA, 21 bp, Homo sapiens
accagctatcagataaggcaa

SEQ ID NO: 6521 - DNA, 21 bp, Homo sapiens
gagagtgtgcttattgcctaa

SEQ ID NO: 6522 - DNA, 21 bp, Homo sapiens
cccaggatgtttgcacatata

SEQ ID NO: 6523 - DNA, 21 bp, Homo sapiens
ctgcatacatgaagccatcaa

SEQ ID NO: 6524 - DNA, 21 bp, Homo sapiens
aagacaaactactgtaccaaa

SEQ ID NO: 6525 - DNA, 21 bp, Homo sapiens
tccagaatctacgtatctata

SEQ ID NO: 6526 - DNA, 21 bp, Homo sapiens
cagaatctacgtatctataga

SEQ ID NO: 6527 - DNA, 21 bp, Homo sapiens
tacgcagactctgaagcttat

SEQ ID NO: 6528 - DNA, 21 bp, Homo sapiens
agcactgatattcaggttcaa

SEQ ID NO: 6529 - DNA, 21 bp, Homo sapiens
cactgtgcccattgcaaataa

SEQ ID NO: 6530 - DNA, 21 bp, Homo sapiens
cggctttgaatgaataaatga

SEQ ID NO: 6531 - DNA, 21 bp, Homo sapiens
ctggttctttgtagtcacata

SEQ ID NO: 6532 - DNA, 21 bp, Homo sapiens
cgcgctcggcacgacatgaaa

SEQ ID NO: 6533 - DNA, 21 bp, Homo sapiens
aagcttataattattatacaa

SEQ ID NO: 6534 - DNA, 21 bp, Homo sapiens
aaggaaggaaattacaaacta

SEQ ID NO: 6535 - DNA, 21 bp, Homo sapiens
aaggagatactgagaagttaa

SEQ ID NO: 6536 - DNA, 21 bp, Homo sapiens
cagtttgattatatttatata

SEQ ID NO: 6537 - DNA, 21 bp, Homo sapiens
atccgactttatgattatgaa

SEQ ID NO: 6538 - DNA, 21 bp, Homo sapiens
ttggactgttatactcttgaa

SEQ ID NO: 6539 - DNA, 21 bp, Homo sapiens
tccgactttatgattatgaaa

SEQ ID NO: 6540 - DNA, 21 bp, Homo sapiens
cagcaataccttggatgatta

SEQ ID NO: 6541 - DNA, 21 bp, Homo sapiens
tgcggcgagtatacatgcaaa

SEQ ID NO: 6542 - DNA, 21 bp, Homo sapiens
tcgggacggtcaaacctataa

SEQ ID NO: 6543 - DNA, 21 bp, Homo sapiens
cgcattctagctcgagtcaaa

SEQ ID NO: 6544 - DNA, 21 bp, Homo sapiens
atcgactattacatcgtagaa

SEQ ID NO: 6545 - DNA, 21 bp, Homo sapiens
cagatcaatcgtgcatcctta

SEQ ID NO: 6546 - DNA, 21 bp, Homo sapiens
catggtctttctacttgtaaa

SEQ ID NO: 6547 - DNA, 21 bp, Homo sapiens
ctgtgaaggtatctatactaa

SEQ ID NO: 6548 - DNA, 21 bp, Homo sapiens
gaaggtatctatactaataaa

SEQ ID NO: 6549 - DNA, 21 bp, Homo sapiens
acgaaattccttgagctcata

SEQ ID NO: 6550 - DNA, 21 bp, Homo sapiens
ctgatgctatatttccgcata

SEQ ID NO: 6551 - DNA, 21 bp, Homo sapiens
cgggtctgtgctgaatgtgta

SEQ ID NO: 6552 - DNA, 21 bp, Homo sapiens
caccatctggtaataaactca

SEQ ID NO: 6553 - DNA, 21 bp, Homo sapiens
acccatgtttaacgacatcaa

SEQ ID NO: 6554 - DNA, 21 bp, Homo sapiens
aaggatttgctagtccactta

SEQ ID NO: 6555 - DNA, 21 bp, Homo sapiens
gaggctcatctttgcaggcaa

SEQ ID NO: 6556 - DNA, 21 bp, Homo sapiens
ccaacttaagtttagaaatta

SEQ ID NO: 6557 - DNA, 21 bp, Homo sapiens
atggcattactctgcactata

SEQ ID NO: 6558 - DNA, 21 bp, Homo sapiens
caggatcctggtatccgctaa

SEQ ID NO: 6559 - DNA, 21 bp, Homo sapiens
ttgcactttcctttcaataaa

SEQ ID NO: 6560 - DNA, 21 bp, Homo sapiens
aacgtcaaagcaaagatccaa

SEQ ID NO: 6561 - DNA, 21 bp, Homo sapiens
gaggttgatctttgctgggaa

SEQ ID NO: 6562 - DNA, 21 bp, Homo sapiens
gaggttgatctttgccggaaa

SEQ ID NO: 6563 - DNA, 21 bp, Homo sapiens
cccgctcacctttgatgtcaa

SEQ ID NO: 6564 - DNA, 21 bp, Homo sapiens
ctgggatgtcacgaagttaaa

SEQ ID NO: 6565 - DNA, 21 bp, Homo sapiens
ttggagtttgacaccaaccaa

SEQ ID NO: 6566 - DNA, 21 bp, Homo sapiens
cggccggatggtcacctgaaa

SEQ ID NO: 6567 - DNA, 21 bp, Homo sapiens
cagcagaaggaactgaacaaa

SEQ ID NO: 6568 - DNA, 21 bp, Homo sapiens
atgcttgttaaaggaaggcaa

SEQ ID NO: 6569 - DNA, 21 bp, Homo sapiens
ctcattagaaaggctaacaaa

SEQ ID NO: 6570 - DNA, 21 bp, Homo sapiens
ttggattacagtatggcaata

SEQ ID NO: 6571 - DNA, 21 bp, Homo sapiens
cccagtattagcaatgaatta

SEQ ID NO: 6572 - DNA, 21 bp, Homo sapiens
acctctcattagaaaggctaa

SEQ ID NO: 6573 - DNA, 21 bp, Homo sapiens
tccgatggagatcaacgtgaa

SEQ ID NO: 6574 - DNA, 21 bp, Homo sapiens
ccgctgctaaattgtcaacta

SEQ ID NO: 6575 - DNA, 21 bp, Homo sapiens
accttgtctcttgcagtttaa

SEQ ID NO: 6576 - DNA, 21 bp, Homo sapiens
aagatgaagaattaactatta

SEQ ID NO: 6577 - DNA, 21 bp, Homo sapiens
tagccagtcataaatacataa

SEQ ID NO: 6578 - DNA, 21 bp, Homo sapiens
cagatttgtgttaagatagta

SEQ ID NO: 6579 - DNA, 21 bp, Homo sapiens
atccatgcgagtaaacattta

SEQ ID NO: 6580 - DNA, 21 bp, Homo sapiens
ttggatgtaacggcttggtaa

SEQ ID NO: 6581 - DNA, 21 bp, Homo sapiens
cacgggaattattattgtcaa

SEQ ID NO: 6582 - DNA, 21 bp, Homo sapiens
aaggaagacttgaacctagaa

SEQ ID NO: 6583 - DNA, 21 bp, Homo sapiens
ccggagaagaagaagatgaaa

SEQ ID NO: 6584 - DNA, 21 bp, Homo sapiens
caggacttccagagagagaaa

SEQ ID NO: 6585 - DNA, 21 bp, Homo sapiens
tccagtgttattaggtataaa

SEQ ID NO: 6586 - DNA, 21 bp, Homo sapiens
cagaataatagcaacaaccga

SEQ ID NO: 6587 - DNA, 21 bp, Homo sapiens
tgcaatgaaagtgttcactaa

SEQ ID NO: 6588 - DNA, 21 bp, Homo sapiens
aacgagaactgtcaaagtcaa

SEQ ID NO: 6589 - DNA, 21 bp, Homo sapiens
tacaatcatgtttgaaattaa

SEQ ID NO: 6590 - DNA, 21 bp, Homo sapiens
acggttgttgatgtcaatgaa

SEQ ID NO: 6591 - DNA, 21 bp, Homo sapiens
ctgggaaacccaataaatgaa

SEQ ID NO: 6592 - DNA, 21 bp, Homo sapiens
cccaataaatgaactccttta

SEQ ID NO: 6593 - DNA, 21 bp, Homo sapiens
atgaggttatattgaaatgta

SEQ ID NO: 6594 - DNA, 21 bp, Homo sapiens
aggaagctaataaataattaa

SEQ ID NO: 6595 - DNA, 21 bp, Homo sapiens
cacattgtatttgaacacaaa

SEQ ID NO: 6596 - DNA, 21 bp, Homo sapiens
ttgggaatattctgactataa

SEQ ID NO: 6597 - DNA, 21 bp, Homo sapiens
cagggcaacaggagtagttca

SEQ ID NO: 6598 - DNA, 21 bp, Homo sapiens
ccggaagaagaagattcggaa

SEQ ID NO: 6599 - DNA, 21 bp, Homo sapiens
atcgtggacttcgctaagcaa

SEQ ID NO: 6600 - DNA, 21 bp, Homo sapiens
ctgggcgagcctgtagaccta

SEQ ID NO: 6601 - DNA, 21 bp, Homo sapiens
caggaaactaatttcctgata

SEQ ID NO: 6602 - DNA, 21 bp, Homo sapiens
cacactttacacaagaatcta

SEQ ID NO: 6603 - DNA, 21 bp, Homo sapiens
cacggagtacaggttcaagta

SEQ ID NO: 6604 - DNA, 21 bp, Homo sapiens
cagtgtgactttcgccaccaa

SEQ ID NO: 6605 - DNA, 21 bp, Homo sapiens
ccgggagcacacagcttacta

SEQ ID NO: 6606 - DNA, 21 bp, Homo sapiens
cgccaccgtgatgatgctcta

SEQ ID NO: 6607 - DNA, 21 bp, Homo sapiens
ccggacaatgtggccttgcaa

SEQ ID NO: 6608 - DNA, 21 bp, Homo sapiens
ccacaggtgaccaccaataaa

SEQ ID NO: 6609 - DNA, 21 bp, Homo sapiens
tacatccagtctgacgacaaa

SEQ ID NO: 6610 - DNA, 21 bp, Homo sapiens
ccagaatttcgtcgttgggaa

SEQ ID NO: 6611 - DNA, 21 bp, Homo sapiens
atcaaggctgcctataatcaa

SEQ ID NO: 6612 - DNA, 21 bp, Homo sapiens
aaggctgcctataatcaagta

SEQ ID NO: 6613 - DNA, 21 bp, Homo sapiens
ccgggagttgcgccagaccaa

SEQ ID NO: 6614 - DNA, 21 bp, Homo sapiens
cagcaagacgggagcgagtaa

SEQ ID NO: 6615 - DNA, 21 bp, Homo sapiens
aagactgtaacgcagacaaca

SEQ ID NO: 6616 - DNA, 21 bp, Homo sapiens
aagagcccagcacaacgaagt

SEQ ID NO: 6617 - DNA, 21 bp, Homo sapiens
caggtacaatttgaccattga

SEQ ID NO: 6618 - DNA, 21 bp, Homo sapiens
cagagggaaacttgactttaa

SEQ ID NO: 6619 - DNA, 21 bp, Homo sapiens
ccggatttaccaccagttgaa

SEQ ID NO: 6620 - DNA, 21 bp, Homo sapiens
ctgtttcaccatggaccctaa

SEQ ID NO: 6621 - DNA, 21 bp, Homo sapiens
cacgaggaaggcatcatctat

SEQ ID NO: 6622 - DNA, 21 bp, Homo sapiens
ccggtttggattatgtgccta

SEQ ID NO: 6623 - DNA, 21 bp, Homo sapiens
cggattagaaccaacctctta

SEQ ID NO: 6624 - DNA, 21 bp, Homo sapiens
aagagagtaatgggtttcata

SEQ ID NO: 6625 - DNA, 21 bp, Homo sapiens
taggtgtttgttcatctgtaa

SEQ ID NO: 6626 - DNA, 21 bp, Homo sapiens
ctgatataaatgcaatattaa

SEQ ID NO: 6627 - DNA, 21 bp, Homo sapiens
cacaagcagtttctaaaccaa

SEQ ID NO: 6628 - DNA, 21 bp, Homo sapiens
cccattgatgacacagtggaa

SEQ ID NO: 6629 - DNA, 21 bp, Homo sapiens
gagggtttcaatatacatcta

SEQ ID NO: 6630 - DNA, 21 bp, Homo sapiens
ctggaatttgatattcattga

SEQ ID NO: 6631 - DNA, 21 bp, Homo sapiens
atagagaattctacatactaa

SEQ ID NO: 6632 - DNA, 21 bp, Homo sapiens
aagaaagatagagcaagacaa

SEQ ID NO: 6633 - DNA, 21 bp, Homo sapiens
caggacagagttggaagagga

SEQ ID NO: 6634 - DNA, 21 bp, Homo sapiens
ccggatgcagatcctcatgat

SEQ ID NO: 6635 - DNA, 21 bp, Homo sapiens
cagtgtgaatgcagacctaaa

SEQ ID NO: 6636 - DNA, 21 bp, Homo sapiens
aagacccaaacctctgcataa

SEQ ID NO: 6637 - DNA, 21 bp, Homo sapiens
ccggaggaagaagcagctgaa

SEQ ID NO: 6638 - DNA, 21 bp, Homo sapiens
cggcagcctcttggtcatgaa

SEQ ID NO: 6639 - DNA, 21 bp, Homo sapiens
caccggttgctgggatacaaa

SEQ ID NO: 6640 - DNA, 21 bp, Homo sapiens
ctccagcatttagataatctt

SEQ ID NO: 6641 - DNA, 21 bp, Homo sapiens
cccgctgttcggcgtccacta

SEQ ID NO: 6642 - DNA, 21 bp, Homo sapiens
aacggagacctcggtcatcta

SEQ ID NO: 6643 - DNA, 21 bp, Homo sapiens
ccctgaaagagtgtcatataa

SEQ ID NO: 6644 - DNA, 21 bp, Homo sapiens
atccaactagttgaacagcta

SEQ ID NO: 6645 - DNA, 21 bp, Homo sapiens
caaggttggtagacatgttaa

SEQ ID NO: 6646 - DNA, 21 bp, Homo sapiens
caagatcgtaggatagtacta

SEQ ID NO: 6647 - DNA, 21 bp, Homo sapiens
aggctatgtattactgtgcta

SEQ ID NO: 6648 - DNA, 21 bp, Homo sapiens
ctgctgagatatttctcacaa

SEQ ID NO: 6649 - DNA, 21 bp, Homo sapiens
tcccaggttcctgctgagata

SEQ ID NO: 6650 - DNA, 21 bp, Homo sapiens
agactgcattagggaattaaa

SEQ ID NO: 6651 - DNA, 21 bp, Homo sapiens
caagtgggacagattcgtcaa

SEQ ID NO: 6652 - DNA, 21 bp, Homo sapiens
cagaaccacatcccaaaggta

SEQ ID NO: 6653 - DNA, 21 bp, Homo sapiens
ctcaattgctgtgcaggttaa

SEQ ID NO: 6654 - DNA, 21 bp, Homo sapiens
cccgaggaagtttatctgcga

SEQ ID NO: 6655 - DNA, 21 bp, Homo sapiens
taagcgtttacccgaattaaa

SEQ ID NO: 6656 - DNA, 21 bp, Homo sapiens
cggcttaagcgtttacccgaa

SEQ ID NO: 6657 - DNA, 21 bp, Homo sapiens
cagagacggcttaagcgttta

SEQ ID NO: 6658 - DNA, 21 bp, Homo sapiens
agcgtttacccgaattaaata

SEQ ID NO: 6659 - DNA, 21 bp, Homo sapiens
aagggacgagatcgttagcta

SEQ ID NO: 6660 - DNA, 21 bp, Homo sapiens
aacatggaagtcaacgtttat

SEQ ID NO: 6661 - DNA, 21 bp, Homo sapiens
cccaccatctctggtctacaa

SEQ ID NO: 6662 - DNA, 21 bp, Homo sapiens
acggcttgcaccattcagcta

SEQ ID NO: 6663 - DNA, 21 bp, Homo sapiens
cagaagggaaactgaaagaaa

SEQ ID NO: 6664 - DNA, 21 bp, Homo sapiens
aaagagctaataaaccgaata

SEQ ID NO: 6665 - DNA, 21 bp, Homo sapiens
caggttcttgatgcctatgaa

SEQ ID NO: 6666 - DNA, 21 bp, Homo sapiens
agggttccaagtatactctta

SEQ ID NO: 6667 - DNA, 21 bp, Homo sapiens
tgcgatcttaataaaccctca

SEQ ID NO: 6668 - DNA, 21 bp, Homo sapiens
ccgtgtgctaatcaacagcaa

SEQ ID NO: 6669 - DNA, 21 bp, Homo sapiens
cccggctatgtgctgagtgaa

SEQ ID NO: 6670 - DNA, 21 bp, Homo sapiens
cagcttaagaatggccagtat

SEQ ID NO: 6671 - DNA, 21 bp, Homo sapiens
caccttctgaaccttcttcaa

SEQ ID NO: 6672 - DNA, 21 bp, Homo sapiens
caggacaaagctcagaaacaa

SEQ ID NO: 6673 - DNA, 21 bp, Homo sapiens
aagcttgtacagttaacttat

SEQ ID NO: 6674 - DNA, 21 bp, Homo sapiens
aaggaccatttcccagagcta

SEQ ID NO: 6675 - DNA, 21 bp, Homo sapiens
aaggcatttattgccatatta

SEQ ID NO: 6676 - DNA, 21 bp, Homo sapiens
ctggagaagaatggctttcaa

SEQ ID NO: 6677 - DNA, 21 bp, Homo sapiens
cagagtaaatactctgaataa

SEQ ID NO: 6678 - DNA, 21 bp, Homo sapiens
ccggataaccttgtaacatat

SEQ ID NO: 6679 - DNA, 21 bp, Homo sapiens
ccgggtctgcagagaatgaaa

SEQ ID NO: 6680 - DNA, 21 bp, Homo sapiens
cacacaaactttacactttaa

SEQ ID NO: 6681 - DNA, 21 bp, Homo sapiens
aaacctgaagcggaaatgcaa

SEQ ID NO: 6682 - DNA, 21 bp, Homo sapiens
caggcactgtttggagccata

SEQ ID NO: 6683 - DNA, 21 bp, Homo sapiens
caggatcggctgagggccaaa

SEQ ID NO: 6684 - DNA, 21 bp, Homo sapiens
acgaatgcgaatccacaacaa

SEQ ID NO: 6685 - DNA, 21 bp, Homo sapiens
ccggctgaagctggagcggaa

SEQ ID NO: 6686 - DNA, 21 bp, Homo sapiens
ccgtgtggacttccacaacaa

SEQ ID NO: 6687 - DNA, 21 bp, Homo sapiens
cagcaccaagtttctgagcaa

SEQ ID NO: 6688 - DNA, 21 bp, Homo sapiens
aagcaaagcctcctcccttaa

SEQ ID NO: 6689 - DNA, 21 bp, Homo sapiens
gacagtctttgcgaaggataa

SEQ ID NO: 6690 - DNA, 21 bp, Homo sapiens
ctgcaccattgctgttccaaa

SEQ ID NO: 6691 - DNA, 21 bp, Homo sapiens
ccggattgtggttcgagtgaa

SEQ ID NO: 6692 - DNA, 21 bp, Homo sapiens
acaggtaataacgtgaaggaa

SEQ ID NO: 6693 - DNA, 21 bp, Homo sapiens
cagccagttatttcaaactaa

SEQ ID NO: 6694 - DNA, 21 bp, Homo sapiens
acggtggagatcaccattcaa

SEQ ID NO: 6695 - DNA, 21 bp, Homo sapiens
aaggagaacctcgttgacaaa

SEQ ID NO: 6696 - DNA, 21 bp, Homo sapiens
atgagattgcgtggctattta

SEQ ID NO: 6697 - DNA, 21 bp, Homo sapiens
cccgactggaaccaaaggtca

SEQ ID NO: 6698 - DNA, 21 bp, Homo sapiens
cccgacttctttggccagtga

SEQ ID NO: 6699 - DNA, 21 bp, Homo sapiens
tacatgttactccctaatcaa

SEQ ID NO: 6700 - DNA, 21 bp, Homo sapiens
ctgtgtcagtttgtaatggaa

SEQ ID NO: 6701 - DNA, 21 bp, Homo sapiens
cccattgtaaagcgacttcaa

SEQ ID NO: 6702 - DNA, 21 bp, Homo sapiens
cagcaaagaatggctcaagaa

SEQ ID NO: 6703 - DNA, 21 bp, Homo sapiens
cacgatgtatacttcccaaat

SEQ ID NO: 6704 - DNA, 21 bp, Homo sapiens
agggtactacgcaagccttaa

SEQ ID NO: 6705 - DNA, 21 bp, Homo sapiens
ttgcaacgacacaaactataa

SEQ ID NO: 6706 - DNA, 21 bp, Homo sapiens
cagggtactacgcaagcctta

SEQ ID NO: 6707 - DNA, 21 bp, Homo sapiens
aagccaaactgaaatcggtaa

SEQ ID NO: 6708 - DNA, 21 bp, Homo sapiens
ccgctgtgaatttgacagcca

SEQ ID NO: 6709 - DNA, 21 bp, Homo sapiens
gagacacttaagggaaattaa

SEQ ID NO: 6710 - DNA, 21 bp, Homo sapiens
cagaattattgctgcaattaa

SEQ ID NO: 6711 - DNA, 21 bp, Homo sapiens
gacgatttattggacatgata

SEQ ID NO: 6712 - DNA, 21 bp, Homo sapiens
accctcataagtcgtcactaa

SEQ ID NO: 6713 - DNA, 21 bp, Homo sapiens
aagcgagtaaccagctcataa

SEQ ID NO: 6714 - DNA, 21 bp, Homo sapiens
aagcataactatgagtgttta

SEQ ID NO: 6715 - DNA, 21 bp, Homo sapiens
gaggctcctgcttatttataa

SEQ ID NO: 6716 - DNA, 21 bp, Homo sapiens
ccagcctacattcacttctaa

SEQ ID NO: 6717 - DNA, 21 bp, Homo sapiens
aagtataatgcagtacattaa

SEQ ID NO: 6718 - DNA, 21 bp, Homo sapiens
aacagtcagtatgcaatctta

SEQ ID NO: 6719 - DNA, 21 bp, Homo sapiens
aaggtttaatctgatatcaaa

SEQ ID NO: 6720 - DNA, 21 bp, Homo sapiens
ctgccgttgttcgggacttaa

SEQ ID NO: 6721 - DNA, 21 bp, Homo sapiens
ctggataatacctttaagaat

SEQ ID NO: 6722 - DNA, 21 bp, Homo sapiens
cagcaatatgttcactatgtt

SEQ ID NO: 6723 - DNA, 21 bp, Homo sapiens
atcaagatgggtgattatgaa

SEQ ID NO: 6724 - DNA, 21 bp, Homo sapiens
atgggtgattatgaaatgcca

SEQ ID NO: 6725 - DNA, 21 bp, Homo sapiens
ttccatcagctttataataaa

SEQ ID NO: 6726 - DNA, 21 bp, Homo sapiens
caggctacagttgatatttaa

SEQ ID NO: 6727 - DNA, 21 bp, Homo sapiens
cagcaagacaagtgaagtcaa

SEQ ID NO: 6728 - DNA, 21 bp, Homo sapiens
aagagttgagtcagaccagta

SEQ ID NO: 6729 - DNA, 21 bp, Homo sapiens
ctgacctcagtagctattaaa

SEQ ID NO: 6730 - DNA, 21 bp, Homo sapiens
cacatagatggtgatggcaaa

SEQ ID NO: 6731 - DNA, 21 bp, Homo sapiens
cagcaatggattatagtttaa

SEQ ID NO: 6732 - DNA, 21 bp, Homo sapiens
ctcgcagaagtcagcacttaa

SEQ ID NO: 6733 - DNA, 21 bp, Homo sapiens
caggctattgtagctattata

SEQ ID NO: 6734 - DNA, 21 bp, Homo sapiens
caccagtgaatccattctcaa

SEQ ID NO: 6735 - DNA, 21 bp, Homo sapiens
cagggaagttatcttggtata

SEQ ID NO: 6736 - DNA, 21 bp, Homo sapiens
accaggtaatttggaagtgaa

SEQ ID NO: 6737 - DNA, 21 bp, Homo sapiens
cagcatatcctgggacataaa

SEQ ID NO: 6738 - DNA, 21 bp, Homo sapiens
cacagtgtatatgcaattcta

SEQ ID NO: 6739 - DNA, 21 bp, Homo sapiens
ccgcaggtccaggtagtgtaa

SEQ ID NO: 6740 - DNA, 21 bp, Homo sapiens
ctggcgattacataagtataa

SEQ ID NO: 6741 - DNA, 21 bp, Homo sapiens
aacgagatgatttgcactata

SEQ ID NO: 6742 - DNA, 21 bp, Homo sapiens
caccaagatcaatgtatacaa

SEQ ID NO: 6743 - DNA, 21 bp, Homo sapiens
caggatcaaattctcacataa

SEQ ID NO: 6744 - DNA, 21 bp, Homo sapiens
cagcatataaacagaaccaaa

SEQ ID NO: 6745 - DNA, 21 bp, Homo sapiens
aagaaagtcaatgaaattaaa

SEQ ID NO: 6746 - DNA, 21 bp, Homo sapiens
caggctgaacttccaggagaa

SEQ ID NO: 6747 - DNA, 21 bp, Homo sapiens
ccgctccttcaccacatctaa

SEQ ID NO: 6748 - DNA, 21 bp, Homo sapiens
catggatgaatgagtatttaa

SEQ ID NO: 6749 - DNA, 21 bp, Homo sapiens
cagggttatatgcaatgttca

SEQ ID NO: 6750 - DNA, 21 bp, Homo sapiens
ctggaggaagatgagccctaa

SEQ ID NO: 6751 - DNA, 21 bp, Homo sapiens
cacatttgaattcacactgaa

SEQ ID NO: 6752 - DNA, 21 bp, Homo sapiens
taggaatttctcataccataa

SEQ ID NO: 6753 - DNA, 21 bp, Homo sapiens
ccagtgggacttgcttcatta

SEQ ID NO: 6754 - DNA, 21 bp, Homo sapiens
tcctgtttagcttgacatgaa

SEQ ID NO: 6755 - DNA, 21 bp, Homo sapiens
aagccagtaattagcatctaa

SEQ ID NO: 6756 - DNA, 21 bp, Homo sapiens
gaggacttacaaagcactata

SEQ ID NO: 6757 - DNA, 21 bp, Homo sapiens
atgcttaatctcacaaagaaa

SEQ ID NO: 6758 - DNA, 21 bp, Homo sapiens
atggaaggaccagaacattaa

SEQ ID NO: 6759 - DNA, 21 bp, Homo sapiens
cacgaatgaggttaactttaa

SEQ ID NO: 6760 - DNA, 21 bp, Homo sapiens
ctggattcatttccaattaaa

SEQ ID NO: 6761 - DNA, 21 bp, Homo sapiens
caggaatgaattctccactaa

SEQ ID NO: 6762 - DNA, 21 bp, Homo sapiens
tcggatggcataagtgattaa

SEQ ID NO: 6763 - DNA, 21 bp, Homo sapiens
ccgaatgaagatgactctcaa

SEQ ID NO: 6764 - DNA, 21 bp, Homo sapiens
cagggtgaacatgccagctaa

SEQ ID NO: 6765 - DNA, 21 bp, Homo sapiens
cctgagtacatttatatttaa

SEQ ID NO: 6766 - DNA, 21 bp, Homo sapiens
ctgggtataagtaagcaagaa

SEQ ID NO: 6767 - DNA, 21 bp, Homo sapiens
cgcaattataataaatgctaa

SEQ ID NO: 6768 - DNA, 21 bp, Homo sapiens
ctccctgaacttcacacataa

SEQ ID NO: 6769 - DNA, 21 bp, Homo sapiens
aacactaacattatccgtaaa

SEQ ID NO: 6770 - DNA, 21 bp, Homo sapiens
ctgccaagtattggaaatgaa

SEQ ID NO: 6771 - DNA, 21 bp, Homo sapiens
aagacctttcatgaaatataa

SEQ ID NO: 6772 - DNA, 21 bp, Homo sapiens
cacaagagtatttcttctgaa

SEQ ID NO: 6773 - DNA, 21 bp, Homo sapiens
acgggcgagatatgaacttaa

SEQ ID NO: 6774 - DNA, 21 bp, Homo sapiens
cgccatgaagtcagctttaaa

SEQ ID NO: 6775 - DNA, 21 bp, Homo sapiens
cacgctgggtattaccatgta

SEQ ID NO: 6776 - DNA, 21 bp, Homo sapiens
acgctgggtattaccatgtaa

SEQ ID NO: 6777 - DNA, 21 bp, Homo sapiens
caggtacataaagaaacaata

SEQ ID NO: 6778 - DNA, 21 bp, Homo sapiens
caggaactattggacatttat

SEQ ID NO: 6779 - DNA, 21 bp, Homo sapiens
aagggctgtatttgggcctaa

SEQ ID NO: 6780 - DNA, 21 bp, Homo sapiens
gagaggcttcttactaggtaa

SEQ ID NO: 6781 - DNA, 21 bp, Homo sapiens
ctggcactaatttataactat

SEQ ID NO: 6782 - DNA, 21 bp, Homo sapiens
ctacacgtaagtataaatgaa

SEQ ID NO: 6783 - DNA, 21 bp, Homo sapiens
cccgggtgattgagatccaaa

SEQ ID NO: 6784 - DNA, 21 bp, Homo sapiens
cagatgtatgtctacacgtaa

SEQ ID NO: 6785 - DNA, 21 bp, Homo sapiens
ttgcggaaaggtaaccacaaa

SEQ ID NO: 6786 - DNA, 21 bp, Homo sapiens
ctggactgactcgggcaataa

SEQ ID NO: 6787 - DNA, 21 bp, Homo sapiens
ccggatggtgtatgactggat

SEQ ID NO: 6788 - DNA, 21 bp, Homo sapiens
cagtaccttactcatcattta

SEQ ID NO: 6789 - DNA, 21 bp, Homo sapiens
ctcggtgtttaggctgaacta

SEQ ID NO: 6790 - DNA, 21 bp, Homo sapiens
ccagatgaaagtcatgagcta

SEQ ID NO: 6791 - DNA, 21 bp, Homo sapiens
ctggacatggactccagtgaa

SEQ ID NO: 6792 - DNA, 21 bp, Homo sapiens
tgggatgatatggaggttcaa

SEQ ID NO: 6793 - DNA, 21 bp, Homo sapiens
cccgaggaattagcacttgtt

SEQ ID NO: 6794 - DNA, 21 bp, Homo sapiens
cggcactgtgcctacctctaa

SEQ ID NO: 6795 - DNA, 21 bp, Homo sapiens
ttggctctggacctgcattaa

SEQ ID NO: 6796 - DNA, 21 bp, Homo sapiens
tcgctttgtgatgcaggtgaa

SEQ ID NO: 6797 - DNA, 21 bp, Homo sapiens
tacctgcactttaatcagata

SEQ ID NO: 6798 - DNA, 21 bp, Homo sapiens
acggaacaagttaccactaca

SEQ ID NO: 6799 - DNA, 21 bp, Homo sapiens
aacaaccggattacacattta

SEQ ID NO: 6800 - DNA, 21 bp, Homo sapiens
caggagtggaatgtacatatt

SEQ ID NO: 6801 - DNA, 21 bp, Homo sapiens
atgactgtgtttaatagtata

SEQ ID NO: 6802 - DNA, 21 bp, Homo sapiens
ctggatgagaataatactcga

SEQ ID NO: 6803 - DNA, 21 bp, Homo sapiens
ccgaaaggtctacaagagtta

SEQ ID NO: 6804 - DNA, 21 bp, Homo sapiens
tcccaagtcaggcaaacataa

SEQ ID NO: 6805 - DNA, 21 bp, Homo sapiens
aagggagacgatcaaggttca

SEQ ID NO: 6806 - DNA, 21 bp, Homo sapiens
cagcaactgcctcaagtataa

SEQ ID NO: 6807 - DNA, 21 bp, Homo sapiens
ccggatctacgctgccttcaa

SEQ ID NO: 6808 - DNA, 21 bp, Homo sapiens
acgctttgagaagcacctgta

SEQ ID NO: 6809 - DNA, 21 bp, Homo sapiens
atggagttgcgtgggattcaa

SEQ ID NO: 6810 - DNA, 21 bp, Homo sapiens
cccaaattattccgcggcaaa

SEQ ID NO: 6811 - DNA, 21 bp, Homo sapiens
cgggccgacaccagtacataa

SEQ ID NO: 6812 - DNA, 21 bp, Homo sapiens
cgagtatgaagtaaatttgaa

SEQ ID NO: 6813 - DNA, 21 bp, Homo sapiens
aacgttgatttgcataataca

SEQ ID NO: 6814 - DNA, 21 bp, Homo sapiens
tcccgttagatcagcattcta

SEQ ID NO: 6815 - DNA, 21 bp, Homo sapiens
tagatcagcattctactacaa

SEQ ID NO: 6816 - DNA, 21 bp, Homo sapiens
cacgtaggccttcaacacaat

SEQ ID NO: 6817 - DNA, 21 bp, Homo sapiens
tacgatcgttatattaaagaa

SEQ ID NO: 6818 - DNA, 21 bp, Homo sapiens
atcagttaatttaccatgtaa

SEQ ID NO: 6819 - DNA, 21 bp, Homo sapiens
acgagatgtgtcagtggtcaa

SEQ ID NO: 6820 - DNA, 21 bp, Homo sapiens
cacaatgtagaaggttggaaa

SEQ ID NO: 6821 - DNA, 21 bp, Homo sapiens
aagaaagactccgtaatctta

SEQ ID NO: 6822 - DNA, 21 bp, Homo sapiens
accctctttcaaagacaataa

SEQ ID NO: 6823 - DNA, 21 bp, Homo sapiens
ttcggaagtggtacaatttaa

SEQ ID NO: 6824 - DNA, 21 bp, Homo sapiens
aaggagacttatctacatata

SEQ ID NO: 6825 - DNA, 21 bp, Homo sapiens
cagcggttgatcaacttggta

SEQ ID NO: 6826 - DNA, 21 bp, Homo sapiens
atgatgcacatgaacattcaa

SEQ ID NO: 6827 - DNA, 21 bp, Homo sapiens
ccggttgctggagttgtgtaa

SEQ ID NO: 6828 - DNA, 21 bp, Homo sapiens
cagctccggtctgatatacaa

SEQ ID NO: 6829 - DNA, 21 bp, Homo sapiens
ccaggtggtgatctttgtgaa

SEQ ID NO: 6830 - DNA, 21 bp, Homo sapiens
ctcaacctcaaacacattaaa

SEQ ID NO: 6831 - DNA, 21 bp, Homo sapiens
atggctcacccttccacccaa

SEQ ID NO: 6832 - DNA, 21 bp, Homo sapiens
ttcaaattgatcatcatcaaa

SEQ ID NO: 6833 - DNA, 21 bp, Homo sapiens
cagcagccacctgaatgtgta

SEQ ID NO: 6834 - DNA, 21 bp, Homo sapiens
gagacgaaggttcaacatcaa

SEQ ID NO: 6835 - DNA, 21 bp, Homo sapiens
ccgcctggagatgaccaacaa

SEQ ID NO: 6836 - DNA, 21 bp, Homo sapiens
aagcaggagctgcctagcgaa

SEQ ID NO: 6837 - DNA, 21 bp, Homo sapiens
ccggtagacttaggtctgtta

SEQ ID NO: 6838 - DNA, 21 bp, Homo sapiens
aagaagtgttgaagtaaccta

SEQ ID NO: 6839 - DNA, 21 bp, Homo sapiens
cagaaacgtgatggagagtaa

SEQ ID NO: 6840 - DNA, 21 bp, Homo sapiens
taagtagaagaaataatttaa

SEQ ID NO: 6841 - DNA, 21 bp, Homo sapiens
acggatgttcatattcgggtt

SEQ ID NO: 6842 - DNA, 21 bp, Homo sapiens
cacggctatccttatagtgat

SEQ ID NO: 6843 - DNA, 21 bp, Homo sapiens
caggattgaaataaatgacaa

SEQ ID NO: 6844 - DNA, 21 bp, Homo sapiens
atggtagcatttagtaatcta

SEQ ID NO: 6845 - DNA, 21 bp, Homo sapiens
cgggtgaagcctggaaattaa

SEQ ID NO: 6846 - DNA, 21 bp, Homo sapiens
aaggattgctttctatatata

SEQ ID NO: 6847 - DNA, 21 bp, Homo sapiens
cggcgctatactaatccaata

SEQ ID NO: 6848 - DNA, 21 bp, Homo sapiens
aagttgtttcttgaccacaaa

SEQ ID NO: 6849 - DNA, 21 bp, Homo sapiens
ctggacttccgtagtgaccaa

SEQ ID NO: 6850 - DNA, 21 bp, Homo sapiens
cagctgaatttgcgacctgta

SEQ ID NO: 6851 - DNA, 21 bp, Homo sapiens
cccagcattctccacccttaa

SEQ ID NO: 6852 - DNA, 21 bp, Homo sapiens
cccagtaaaggctgagatgaa

SEQ ID NO: 6853 - DNA, 21 bp, Homo sapiens
cccggagatgatcccaacaaa

SEQ ID NO: 6854 - DNA, 21 bp, Homo sapiens
cagagatatttgtgaacttta

SEQ ID NO: 6855 - DNA, 21 bp, Homo sapiens
cccacagatgtctgttgccaa

SEQ ID NO: 6856 - DNA, 21 bp, Homo sapiens
ctggcctgtgtgtaagtcaaa

SEQ ID NO: 6857 - DNA, 21 bp, Homo sapiens
cagctctttccaagacttcaa

SEQ ID NO: 6858 - DNA, 21 bp, Homo sapiens
ctgctatttctagacatgaaa

SEQ ID NO: 6859 - DNA, 21 bp, Homo sapiens
cggaaccatctctcacattaa

SEQ ID NO: 6860 - DNA, 21 bp, Homo sapiens
cacctatgtcatagaggctaa

SEQ ID NO: 6861 - DNA, 21 bp, Homo sapiens
cagctgcaatttgaagatcga

SEQ ID NO: 6862 - DNA, 21 bp, Homo sapiens
ccggttagaatccatggacaa

SEQ ID NO: 6863 - DNA, 21 bp, Homo sapiens
aagagaagtggttatatcgaa

SEQ ID NO: 6864 - DNA, 21 bp, Homo sapiens
cccacgttagttctacattat

SEQ ID NO: 6865 - DNA, 21 bp, Homo sapiens
ctggtcaatagtgattaccaa

SEQ ID NO: 6866 - DNA, 21 bp, Homo sapiens
accgactaagcaaataggcaa

SEQ ID NO: 6867 - DNA, 21 bp, Homo sapiens
atgggagaggcaataaataaa

SEQ ID NO: 6868 - DNA, 21 bp, Homo sapiens
aacgagttgcagagcatataa

SEQ ID NO: 6869 - DNA, 21 bp, Homo sapiens
ctggacagtatcccacatcca

SEQ ID NO: 6870 - DNA, 21 bp, Homo sapiens
cacaatttgcactaaatcaga

SEQ ID NO: 6871 - DNA, 21 bp, Homo sapiens
ccgagtaaggcgcgagcggaa

SEQ ID NO: 6872 - DNA, 21 bp, Homo sapiens
cccacctagaacactaactca

SEQ ID NO: 6873 - DNA, 21 bp, Homo sapiens
ctggaggacttgataccggaa

SEQ ID NO: 6874 - DNA, 21 bp, Homo sapiens
ccagctgattcagttaatata

SEQ ID NO: 6875 - DNA, 21 bp, Homo sapiens
caggtttgaatcagtcaccta

SEQ ID NO: 6876 - DNA, 21 bp, Homo sapiens
cagctggttattggagtaaga

SEQ ID NO: 6877 - DNA, 21 bp, Homo sapiens
agggactgtgttgcttgtgaa

SEQ ID NO: 6878 - DNA, 21 bp, Homo sapiens
atgcaacaatagattccatta

SEQ ID NO: 6879 - DNA, 21 bp, Homo sapiens
cagagaatgctggtagcttaa

SEQ ID NO: 6880 - DNA, 21 bp, Homo sapiens
aacagcatacctgctaagcta

SEQ ID NO: 6881 - DNA, 21 bp, Homo sapiens
ctcggagtggtttgagaacta

SEQ ID NO: 6882 - DNA, 21 bp, Homo sapiens
cccgttgagtcccatagggaa

SEQ ID NO: 6883 - DNA, 21 bp, Homo sapiens
cggccggagtttgtaatcaaa

SEQ ID NO: 6884 - DNA, 21 bp, Homo sapiens
caccagcatgtctaaggcata

SEQ ID NO: 6885 - DNA, 21 bp, Homo sapiens
tagagcttgaaccaccttcta

SEQ ID NO: 6886 - DNA, 21 bp, Homo sapiens
caggatggcggtggagagaca

SEQ ID NO: 6887 - DNA, 21 bp, Homo sapiens
ccgcgtgtgctttgagcacta

SEQ ID NO: 6888 - DNA, 21 bp, Homo sapiens
cagcgtggtcatctgggccaa

SEQ ID NO: 6889 - DNA, 21 bp, Homo sapiens
cccggcgtcccagacaagtaa

SEQ ID NO: 6890 - DNA, 21 bp, Homo sapiens
cagacatgggttgatcaccta

SEQ ID NO: 6891 - DNA, 21 bp, Homo sapiens
aacgttggcaatgaaagatat

SEQ ID NO: 6892 - DNA, 21 bp, Homo sapiens
caccataacatagctccgaaa

SEQ ID NO: 6893 - DNA, 21 bp, Homo sapiens
atcatgatgaattgaaatgaa

SEQ ID NO: 6894 - DNA, 21 bp, Homo sapiens
ccgcacagtcatgtaattcaa

SEQ ID NO: 6895 - DNA, 21 bp, Homo sapiens
caggttcctcttactatgata

SEQ ID NO: 6896 - DNA, 21 bp, Homo sapiens
cagctattctcacacatctaa

SEQ ID NO: 6897 - DNA, 21 bp, Homo sapiens
cccgggctacaaagtgaccaa

SEQ ID NO: 6898 - DNA, 21 bp, Homo sapiens
ctgcctgacacttcacaacaa

SEQ ID NO: 6899 - DNA, 21 bp, Homo sapiens
ccgaagtgccattgtcatcaa

SEQ ID NO: 6900 - DNA, 21 bp, Homo sapiens
aaggaattatgaagctaagaa

SEQ ID NO: 6901 - DNA, 21 bp, Homo sapiens
ctccttgggtttatgcaaata

SEQ ID NO: 6902 - DNA, 21 bp, Homo sapiens
cagggagattactatggagat

SEQ ID NO: 6903 - DNA, 21 bp, Homo sapiens
ccgggtggcgtcatgcaggta

SEQ ID NO: 6904 - DNA, 21 bp, Homo sapiens
gcccatccacatgtacatcaa

SEQ ID NO: 6905 - DNA, 21 bp, Homo sapiens
cacgatgcagtacatcctcaa

SEQ ID NO: 6906 - DNA, 21 bp, Homo sapiens
gcccaggagtttggcatctta

SEQ ID NO: 6907 - DNA, 21 bp, Homo sapiens
cactatgggactggatacaaa

SEQ ID NO: 6908 - DNA, 21 bp, Homo sapiens
cagctccttcctgctgaagaa

SEQ ID NO: 6909 - DNA, 21 bp, Homo sapiens
ctgttagactgttagatttaa

SEQ ID NO: 6910 - DNA, 21 bp, Homo sapiens
tagatttaaatgtatattgat

SEQ ID NO: 6911 - DNA, 21 bp, Homo sapiens
gcggagaagaatgagtatgaa

SEQ ID NO: 6912 - DNA, 21 bp, Homo sapiens
atggttgacagtgtccgtaaa

SEQ ID NO: 6913 - DNA, 21 bp, Homo sapiens
aagcgtgctaacgataaagaa

SEQ ID NO: 6914 - DNA, 21 bp, Homo sapiens
aaccaacccaatactatatta

SEQ ID NO: 6915 - DNA, 21 bp, Homo sapiens
accacatttatggaccatgaa

SEQ ID NO: 6916 - DNA, 21 bp, Homo sapiens
caggaagaaagggaaattgca

SEQ ID NO: 6917 - DNA, 21 bp, Homo sapiens
cagagaaataaagatgcctca

SEQ ID NO: 6918 - DNA, 21 bp, Homo sapiens
tggcttctacgtgaccaccaa

SEQ ID NO: 6919 - DNA, 21 bp, Homo sapiens
ctgggcagagttcatcttctt

SEQ ID NO: 6920 - DNA, 21 bp, Homo sapiens
accctaggatagtctcataaa

SEQ ID NO: 6921 - DNA, 21 bp, Homo sapiens
cccattgaacgcaaggtcata

SEQ ID NO: 6922 - DNA, 21 bp, Homo sapiens
aaggtcgaagtgtacccagta

SEQ ID NO: 6923 - DNA, 21 bp, Homo sapiens
accgattctattggcctagta

SEQ ID NO: 6924 - DNA, 21 bp, Homo sapiens
ctgcgtcgggtacgtgatgaa

SEQ ID NO: 6925 - DNA, 21 bp, Homo sapiens
caggactatcggaccgagcaa

SEQ ID NO: 6926 - DNA, 21 bp, Homo sapiens
ccagaaggtgtcgatgcacta

SEQ ID NO: 6927 - DNA, 21 bp, Homo sapiens
ctccaacgtgcgcgtcataaa

SEQ ID NO: 6928 - DNA, 21 bp, Homo sapiens
accactcactatcgacggcaa

SEQ ID NO: 6929 - DNA, 21 bp, Homo sapiens
tcggaagtgaatgacaagaat

SEQ ID NO: 6930 - DNA, 21 bp, Homo sapiens
atggaggagattcgtaagaaa

SEQ ID NO: 6931 - DNA, 21 bp, Homo sapiens
cggcgtattgatgaaatcaat

SEQ ID NO: 6932 - DNA, 21 bp, Homo sapiens
caccatcacactttaattcca

SEQ ID NO: 6933 - DNA, 21 bp, Homo sapiens
ccgggccgccctgcacctcta

SEQ ID NO: 6934 - DNA, 21 bp, Homo sapiens
acgagctttcacaataaattt

SEQ ID NO: 6935 - DNA, 21 bp, Homo sapiens
cacagagagcacagatgtcaa

SEQ ID NO: 6936 - DNA, 21 bp, Homo sapiens
ccgccctgcacctctattcca

SEQ ID NO: 6937 - DNA, 21 bp, Homo sapiens
tcccttctgttcagtaaacaa

SEQ ID NO: 6938 - DNA, 21 bp, Homo sapiens
ctgttcagtaaacaaactgaa

SEQ ID NO: 6939 - DNA, 21 bp, Homo sapiens
cagggacacactcgtgagcat

SEQ ID NO: 6940 - DNA, 21 bp, Homo sapiens
taggctgtttctgatatccaa

SEQ ID NO: 6941 - DNA, 21 bp, Homo sapiens
ctggttcttaaatgtttgtta

SEQ ID NO: 6942 - DNA, 21 bp, Homo sapiens
ccgaatttccgtcatcaactt

SEQ ID NO: 6943 - DNA, 21 bp, Homo sapiens
cagggacagccctgccatcaa

SEQ ID NO: 6944 - DNA, 21 bp, Homo sapiens
atcaagaacgtgagtgctata

SEQ ID NO: 6945 - DNA, 21 bp, Homo sapiens
gcggagagacttctgcatcaa

SEQ ID NO: 6946 - DNA, 21 bp, Homo sapiens
catggtgttaatgcaggacaa

SEQ ID NO: 6947 - DNA, 21 bp, Homo sapiens
ctgacgattgcttagcattaa

SEQ ID NO: 6948 - DNA, 21 bp, Homo sapiens
cgcgtccaaaggctaaatgaa

SEQ ID NO: 6949 - DNA, 21 bp, Homo sapiens
cccagagacgttggatctcaa

SEQ ID NO: 6950 - DNA, 21 bp, Homo sapiens
cagggtagaaacgttgagaat

SEQ ID NO: 6951 - DNA, 21 bp, Homo sapiens
caccgtcaaggtcatcgataa

SEQ ID NO: 6952 - DNA, 21 bp, Homo sapiens
ccgggatgagcccaacatgaa

SEQ ID NO: 6953 - DNA, 21 bp, Homo sapiens
tccaatgactttgggaattta

SEQ ID NO: 6954 - DNA, 21 bp, Homo sapiens
aacagcgttcttccaatctca

SEQ ID NO: 6955 - DNA, 21 bp, Homo sapiens
aagaagcgtggtggccacaaa

SEQ ID NO: 6956 - DNA, 21 bp, Homo sapiens
aaggacaaattcctgctacta

SEQ ID NO: 6957 - DNA, 21 bp, Homo sapiens
atggcatatatgcaacattaa

SEQ ID NO: 6958 - DNA, 21 bp, Homo sapiens
ctgcctatgaggaatatataa

SEQ ID NO: 6959 - DNA, 21 bp, Homo sapiens
cgggaaaggtgttggcattaa

SEQ ID NO: 6960 - DNA, 21 bp, Homo sapiens
ctggatacctgccgaccttaa

SEQ ID NO: 6961 - DNA, 21 bp, Homo sapiens
cagcatcgttgtggcgtacta

SEQ ID NO: 6962 - DNA, 21 bp, Homo sapiens
cagctacagatactacttcaa

SEQ ID NO: 6963 - DNA, 21 bp, Homo sapiens
acggatctcctttgagtatga

SEQ ID NO: 6964 - DNA, 21 bp, Homo sapiens
attgaagagtctgcaaataaa

SEQ ID NO: 6965 - DNA, 21 bp, Homo sapiens
taggccagtcaatgtcgtcaa

SEQ ID NO: 6966 - DNA, 21 bp, Homo sapiens
tacgagcagtatgaatatcat

SEQ ID NO: 6967 - DNA, 21 bp, Homo sapiens
atggtgcttaatgaatctcca

SEQ ID NO: 6968 - DNA, 21 bp, Homo sapiens
ctggagagagttgctattcca

SEQ ID NO: 6969 - DNA, 21 bp, Homo sapiens
taggtgatcgatacttgtcaa

SEQ ID NO: 6970 - DNA, 21 bp, Homo sapiens
cagaatgatagtgcctttaaa

SEQ ID NO: 6971 - DNA, 21 bp, Homo sapiens
ctccaagtaaatgtgtgctta

SEQ ID NO: 6972 - DNA, 21 bp, Homo sapiens
gccactcaagtctcacataaa

SEQ ID NO: 6973 - DNA, 21 bp, Homo sapiens
ttgccactattgtttcattat

SEQ ID NO: 6974 - DNA, 21 bp, Homo sapiens
caagctcttgtccaacccaaa

SEQ ID NO: 6975 - DNA, 21 bp, Homo sapiens
caaggccatgggcatcatgaa

SEQ ID NO: 6976 - DNA, 21 bp, Homo sapiens
ttcggtcagtctcggcccaca

SEQ ID NO: 6977 - DNA, 21 bp, Homo sapiens
taacgacatatttgagcgcat

SEQ ID NO: 6978 - DNA, 21 bp, Homo sapiens
ccaagtaaacattccaagtaa

SEQ ID NO: 6979 - DNA, 21 bp, Homo sapiens
ctgctctatcttgggtttctt

SEQ ID NO: 6980 - DNA, 21 bp, Homo sapiens
atccgtggcgagcgagcataa

SEQ ID NO: 6981 - DNA, 21 bp, Homo sapiens
ccgcaaggtcttgagagacaa

SEQ ID NO: 6982 - DNA, 21 bp, Homo sapiens
gcggatctctggcctcattta

SEQ ID NO: 6983 - DNA, 21 bp, Homo sapiens
cagctggacctgcaacacaaa

SEQ ID NO: 6984 - DNA, 21 bp, Homo sapiens
caggaccaaagtgctgcacat

SEQ ID NO: 6985 - DNA, 21 bp, Homo sapiens
caggcgactgctcatcttcaa

SEQ ID NO: 6986 - DNA, 21 bp, Homo sapiens
cagcgattgtgaagaacatga

SEQ ID NO: 6987 - DNA, 21 bp, Homo sapiens
gaggagatacaagatattatt

SEQ ID NO: 6988 - DNA, 21 bp, Homo sapiens
ctcgaaagaacaaatcatgaa

SEQ ID NO: 6989 - DNA, 21 bp, Homo sapiens
catgatattagctagacataa

SEQ ID NO: 6990 - DNA, 21 bp, Homo sapiens
atgatattagctagacataaa

SEQ ID NO: 6991 - DNA, 21 bp, Homo sapiens
caggtgtcttcagctacatga

SEQ ID NO: 6992 - DNA, 21 bp, Homo sapiens
tggaatcttcagacaaggata

SEQ ID NO: 6993 - DNA, 21 bp, Homo sapiens
ctgggttcagtggaatcttca

SEQ ID NO: 6994 - DNA, 21 bp, Homo sapiens
cagggcgctctgtgtcagcta

SEQ ID NO: 6995 - DNA, 21 bp, Homo sapiens
cacgcgtttcctcaccaccta

SEQ ID NO: 6996 - DNA, 21 bp, Homo sapiens
cccatttgacacccaggttaa

SEQ ID NO: 6997 - DNA, 21 bp, Homo sapiens
ccgctttaagtttaaggagta

SEQ ID NO: 6998 - DNA, 21 bp, Homo sapiens
cacgccatacgatacaaagaa

SEQ ID NO: 6999 - DNA, 21 bp, Homo sapiens
cagcagattatcagcgcaaat

SEQ ID NO: 7000 - DNA, 21 bp, Homo sapiens
ttgctgtagattgcctagtaa

SEQ ID NO: 7001 - DNA, 21 bp, Homo sapiens
cagcagtatactaaccagctt

SEQ ID NO: 7002 - DNA, 21 bp, Homo sapiens
tctgatgaaattagcgaataa

SEQ ID NO: 7003 - DNA, 21 bp, Homo sapiens
cagggtgtgagctggaacaaa

SEQ ID NO: 7004 - DNA, 21 bp, Homo sapiens
caggctgagacagaatcctta

SEQ ID NO: 7005 - DNA, 21 bp, Homo sapiens
aaccggctttgaaagagttaa

SEQ ID NO: 7006 - DNA, 21 bp, Homo sapiens
acacgtgatctcagaggccaa

SEQ ID NO: 7007 - DNA, 21 bp, Homo sapiens
gcggctggagtgcatcgataa

SEQ ID NO: 7008 - DNA, 21 bp, Homo sapiens
tacgagtacggcccagactta

SEQ ID NO: 7009 - DNA, 21 bp, Homo sapiens
caggttaggttcctgatgaaa

SEQ ID NO: 7010 - DNA, 21 bp, Homo sapiens
caggtggaattatgtggccaa

SEQ ID NO: 7011 - DNA, 21 bp, Homo sapiens
cgcgcgctttgggaacaggaa

SEQ ID NO: 7012 - DNA, 21 bp, Homo sapiens
ctcgctaaagaagctttgtaa

SEQ ID NO: 7013 - DNA, 21 bp, Homo sapiens
atggaggatctaaggatgaaa

SEQ ID NO: 7014 - DNA, 21 bp, Homo sapiens
aagcatttattcgaagcattt

SEQ ID NO: 7015 - DNA, 21 bp, Homo sapiens
atctcacaattatgtatttaa

SEQ ID NO: 7016 - DNA, 21 bp, Homo sapiens
gacactaatacagatgattaa

SEQ ID NO: 7017 - DNA, 21 bp, Homo sapiens
tagccgtttgttgacactaat

SEQ ID NO: 7018 - DNA, 21 bp, Homo sapiens
tcggcttgtttgaatctcaca

SEQ ID NO: 7019 - DNA, 21 bp, Homo sapiens
atgatgcaattgaattattca

SEQ ID NO: 7020 - DNA, 21 bp, Homo sapiens
cacaataagcctgttaaacaa

SEQ ID NO: 7021 - DNA, 21 bp, Homo sapiens
cccttatgtattcaagcttaa

SEQ ID NO: 7022 - DNA, 21 bp, Homo sapiens
cagaaactgttccttacttaa

SEQ ID NO: 7023 - DNA, 21 bp, Homo sapiens
cacgagtgtgttgcacgttta

SEQ ID NO: 7024 - DNA, 21 bp, Homo sapiens
gcggagttctatattcacata

SEQ ID NO: 7025 - DNA, 21 bp, Homo sapiens
tcccgtcagcgagatctacaa

SEQ ID NO: 7026 - DNA, 21 bp, Homo sapiens
cagcgtttgcctggtctggaa

SEQ ID NO: 7027 - DNA, 21 bp, Homo sapiens
cgggctcaccttaaaggtcaa

SEQ ID NO: 7028 - DNA, 21 bp, Homo sapiens
cacacaaattattcagatgta

SEQ ID NO: 7029 - DNA, 21 bp, Homo sapiens
cagatttgccatcctccttaa

SEQ ID NO: 7030 - DNA, 21 bp, Homo sapiens
aagcatattgcttgctattaa

SEQ ID NO: 7031 - DNA, 21 bp, Homo sapiens
aagatatgcctttaatattta

SEQ ID NO: 7032 - DNA, 21 bp, Homo sapiens
gaggctggtgttactgatgaa

SEQ ID NO: 7033 - DNA, 21 bp, Homo sapiens
caggctttgatcattgaccaa

SEQ ID NO: 7034 - DNA, 21 bp, Homo sapiens
caggtttctgttcaaaccgaa

SEQ ID NO: 7035 - DNA, 21 bp, Homo sapiens
acggctttcattaccaaataa

SEQ ID NO: 7036 - DNA, 21 bp, Homo sapiens
tcggaaagatataccctgtat

SEQ ID NO: 7037 - DNA, 21 bp, Homo sapiens
cagataatagtcggaaacaaa

SEQ ID NO: 7038 - DNA, 21 bp, Homo sapiens
cagactttccgtagcagctta

SEQ ID NO: 7039 - DNA, 21 bp, Homo sapiens
ccgcccgggctgggcactaaa

SEQ ID NO: 7040 - DNA, 21 bp, Homo sapiens
ctcagacaagttcgacattta

SEQ ID NO: 7041 - DNA, 21 bp, Homo sapiens
cccagtctttggcaataacaa

SEQ ID NO: 7042 - DNA, 21 bp, Homo sapiens
taccatcggagagtcattaaa

SEQ ID NO: 7043 - DNA, 21 bp, Homo sapiens
tacatggaggacgttactcaa

SEQ ID NO: 7044 - DNA, 21 bp, Homo sapiens
atggccaagggtgaattctaa

SEQ ID NO: 7045 - DNA, 21 bp, Homo sapiens
ctcggcgtcgtcgaagataaa

SEQ ID NO: 7046 - DNA, 21 bp, Homo sapiens
acgggtcttcctagcacatca

SEQ ID NO: 7047 - DNA, 21 bp, Homo sapiens
aacgaactatttcctccagta

SEQ ID NO: 7048 - DNA, 21 bp, Homo sapiens
cagagttaagctgataaatga

SEQ ID NO: 7049 - DNA, 21 bp, Homo sapiens
accgatgaaactagtcaaata

SEQ ID NO: 7050 - DNA, 21 bp, Homo sapiens
tccaatgaacgcctacaacta

SEQ ID NO: 7051 - DNA, 21 bp, Homo sapiens
taccagctggatttaggttaa

SEQ ID NO: 7052 - DNA, 21 bp, Homo sapiens
aacgtttgggtgactcatgaa

SEQ ID NO: 7053 - DNA, 21 bp, Homo sapiens
gcgggtccagttaaacataat

SEQ ID NO: 7054 - DNA, 21 bp, Homo sapiens
cgagacattaccactattaaa

SEQ ID NO: 7055 - DNA, 21 bp, Homo sapiens
tgggtaaatcacctatactta

SEQ ID NO: 7056 - DNA, 21 bp, Homo sapiens
atggtgaattccaacaactat

SEQ ID NO: 7057 - DNA, 21 bp, Homo sapiens
aaaggcattgtccaaagttta

SEQ ID NO: 7058 - DNA, 21 bp, Homo sapiens
caccttagtactttagactaa

SEQ ID NO: 7059 - DNA, 21 bp, Homo sapiens
cagcggctccattaacatcta

SEQ ID NO: 7060 - DNA, 21 bp, Homo sapiens
acggcatgtatcacagatgta

SEQ ID NO: 7061 - DNA, 21 bp, Homo sapiens
cggccagaagatcctccacaa

SEQ ID NO: 7062 - DNA, 21 bp, Homo sapiens
ccagaagatcctccacaagaa

SEQ ID NO: 7063 - DNA, 21 bp, Homo sapiens
ccgggcgctcatgcacctgaa

SEQ ID NO: 7064 - DNA, 21 bp, Homo sapiens
cagaagatcctccacaagaaa

SEQ ID NO: 7065 - DNA, 21 bp, Homo sapiens
cagctttgatgaaatggctaa

SEQ ID NO: 7066 - DNA, 21 bp, Homo sapiens
cacaatcgacttcattgtaaa

SEQ ID NO: 7067 - DNA, 21 bp, Homo sapiens
cagcaatgccttatttataat

SEQ ID NO: 7068 - DNA, 21 bp, Homo sapiens
caggctgttaagtctgggaaa

SEQ ID NO: 7069 - DNA, 21 bp, Homo sapiens
gaggagcttctgcatttccaa

SEQ ID NO: 7070 - DNA, 21 bp, Homo sapiens
accataaataatggcatagta

SEQ ID NO: 7071 - DNA, 21 bp, Homo sapiens
ttcggaaatgcctcacatata

SEQ ID NO: 7072 - DNA, 21 bp, Homo sapiens
ctcctctagttcagagacata

SEQ ID NO: 7073 - DNA, 21 bp, Homo sapiens
actggatattatagaaaccaa

SEQ ID NO: 7074 - DNA, 21 bp, Homo sapiens
agcatggtaacttatattgaa

SEQ ID NO: 7075 - DNA, 21 bp, Homo sapiens
gcggtttactatagacaaata

SEQ ID NO: 7076 - DNA, 21 bp, Homo sapiens
cagcggtttactatagacaaa

SEQ ID NO: 7077 - DNA, 21 bp, Homo sapiens
cacgctagaagggtttatgaa

SEQ ID NO: 7078 - DNA, 21 bp, Homo sapiens
aagactaattagcccatataa

SEQ ID NO: 7079 - DNA, 21 bp, Homo sapiens
cccttcttaaacagtataata

SEQ ID NO: 7080 - DNA, 21 bp, Homo sapiens
taccggcgtgttattgaacga

SEQ ID NO: 7081 - DNA, 21 bp, Homo sapiens
atccattaatcagatgcgtaa

SEQ ID NO: 7082 - DNA, 21 bp, Homo sapiens
ctagatcgatggaaagttcaa

SEQ ID NO: 7083 - DNA, 21 bp, Homo sapiens
ctggaagtcgttggagtatat

SEQ ID NO: 7084 - DNA, 21 bp, Homo sapiens
atcgatggaaagttcaagtaa

SEQ ID NO: 7085 - DNA, 21 bp, Homo sapiens
cgcgcagaacctggatctgaa

SEQ ID NO: 7086 - DNA, 21 bp, Homo sapiens
cccggagacaaaggcaatcat

SEQ ID NO: 7087 - DNA, 21 bp, Homo sapiens
ccggatctcagtcaaaggcat

SEQ ID NO: 7088 - DNA, 21 bp, Homo sapiens
tacgccaaagtcatcaagaaa

SEQ ID NO: 7089 - DNA, 21 bp, Homo sapiens
cagcccgaggtcatcctgcta

SEQ ID NO: 7090 - DNA, 21 bp, Homo sapiens
ctgcctcaccgttactttcaa

SEQ ID NO: 7091 - DNA, 21 bp, Homo sapiens
gaggctggtcgcccaaatata

SEQ ID NO: 7092 - DNA, 21 bp, Homo sapiens
aagcccttctttgggaatata

SEQ ID NO: 7093 - DNA, 21 bp, Homo sapiens
cagcctggatgaagactccaa

SEQ ID NO: 7094 - DNA, 21 bp, Homo sapiens
caggagatacagctctagata

SEQ ID NO: 7095 - DNA, 21 bp, Homo sapiens
ctgcatgacctgggcattgta

SEQ ID NO: 7096 - DNA, 21 bp, Homo sapiens
caggtgctggatgctgtgaaa

SEQ ID NO: 7097 - DNA, 21 bp, Homo sapiens
ctcgagtggcagatatactaa

SEQ ID NO: 7098 - DNA, 21 bp, Homo sapiens
ccgacctagaacagaccttca

SEQ ID NO: 7099 - DNA, 21 bp, Homo sapiens
caagtttgctattcaaatcaa

SEQ ID NO: 7100 - DNA, 21 bp, Homo sapiens
aagagtaatggtcaatcttaa

SEQ ID NO: 7101 - DNA, 21 bp, Homo sapiens
ctggtggacgctcgaatgtta

SEQ ID NO: 7102 - DNA, 21 bp, Homo sapiens
tcgaatgttagatcaccttaa

SEQ ID NO: 7103 - DNA, 21 bp, Homo sapiens
cacgggtaaagagaactgttt

SEQ ID NO: 7104 - DNA, 21 bp, Homo sapiens
acggctcaactatgaccggaa

SEQ ID NO: 7105 - DNA, 21 bp, Homo sapiens
ctggacaaccttgcaagacaa

SEQ ID NO: 7106 - DNA, 21 bp, Homo sapiens
caggtggagagggttaatgaa

SEQ ID NO: 7107 - DNA, 21 bp, Homo sapiens
atggtgtatttaaataataaa

SEQ ID NO: 7108 - DNA, 21 bp, Homo sapiens
atgactgaatatgaacattaa

SEQ ID NO: 7109 - DNA, 21 bp, Homo sapiens
ccaaataatgtcggcttacaa

SEQ ID NO: 7110 - DNA, 21 bp, Homo sapiens
cagaattgatgtgctgctaaa

SEQ ID NO: 7111 - DNA, 21 bp, Homo sapiens
ccgtacagtgatgatgacgaa

SEQ ID NO: 7112 - DNA, 21 bp, Homo sapiens
caagatcagcaagaacccgaa

SEQ ID NO: 7113 - DNA, 21 bp, Homo sapiens
aacggatattattaaattcat

SEQ ID NO: 7114 - DNA, 21 bp, Homo sapiens
cagaatgatctgaaagttcat

SEQ ID NO: 7115 - DNA, 21 bp, Homo sapiens
tagtgttctgcttataattaa

SEQ ID NO: 7116 - DNA, 21 bp, Homo sapiens
cagagttaccctctaaagata

SEQ ID NO: 7117 - DNA, 21 bp, Homo sapiens
aaggctattaatatcatacta

SEQ ID NO: 7118 - DNA, 21 bp, Homo sapiens
tgggtacaacatcgaataata

SEQ ID NO: 7119 - DNA, 21 bp, Homo sapiens
ccctgtattaagcaagaatta

SEQ ID NO: 7120 - DNA, 21 bp, Homo sapiens
cccgggcatgttcgtctctca

SEQ ID NO: 7121 - DNA, 21 bp, Homo sapiens
tcgagtgactttctaacccaa

SEQ ID NO: 7122 - DNA, 21 bp, Homo sapiens
ccggagcttcatctagtgatt

SEQ ID NO: 7123 - DNA, 21 bp, Homo sapiens
ccaggaaatgatcgacaggta

SEQ ID NO: 7124 - DNA, 21 bp, Homo sapiens
ctcaacaagttctatactaaa

SEQ ID NO: 7125 - DNA, 21 bp, Homo sapiens
caggagggcgttagtggatca

SEQ ID NO: 7126 - DNA, 21 bp, Homo sapiens
cagacccactactatagtaaa

SEQ ID NO: 7127 - DNA, 21 bp, Homo sapiens
cagggaattcagctccagtaa

SEQ ID NO: 7128 - DNA, 21 bp, Homo sapiens
tccgagcagtgtggtggttta

SEQ ID NO: 7129 - DNA, 21 bp, Homo sapiens
atccatgctcttgaccttgta

SEQ ID NO: 7130 - DNA, 21 bp, Homo sapiens
cagcgtcgccctgttcttcta

SEQ ID NO: 7131 - DNA, 21 bp, Homo sapiens
cagatggatcctaatagaata

SEQ ID NO: 7132 - DNA, 21 bp, Homo sapiens
acgggttgaccttatgagaaa

SEQ ID NO: 7133 - DNA, 21 bp, Homo sapiens
tagcatgttgtcagtggccaa

SEQ ID NO: 7134 - DNA, 21 bp, Homo sapiens
tcggtttgaatacgtcactta

SEQ ID NO: 7135 - DNA, 21 bp, Homo sapiens
cacatattcgatgatgctcaa

SEQ ID NO: 7136 - DNA, 21 bp, Homo sapiens
ctgctatatattcaccatgta

SEQ ID NO: 7137 - DNA, 21 bp, Homo sapiens
catggtgttcttggcgctgta

SEQ ID NO: 7138 - DNA, 21 bp, Homo sapiens
acccgcgtgtctgattacaaa

SEQ ID NO: 7139 - DNA, 21 bp, Homo sapiens
tcgctcggacttcaacaacta

SEQ ID NO: 7140 - DNA, 21 bp, Homo sapiens
ccgggtcaactgctcggtcta

SEQ ID NO: 7141 - DNA, 21 bp, Homo sapiens
ttgggaagaagtgacatgtca

SEQ ID NO: 7142 - DNA, 21 bp, Homo sapiens
tccgcggaggaagacagcgaa

SEQ ID NO: 7143 - DNA, 21 bp, Homo sapiens
cccagaggtttggcagaaata

SEQ ID NO: 7144 - DNA, 21 bp, Homo sapiens
cagggatcctggaggaatgaa

SEQ ID NO: 7145 - DNA, 21 bp, Homo sapiens
ccggattactggacaatacat

SEQ ID NO: 7146 - DNA, 21 bp, Homo sapiens
caggatgaggaagtacagaca

SEQ ID NO: 7147 - DNA, 21 bp, Homo sapiens
gcgggtgctgaaggtagtcaa

SEQ ID NO: 7148 - DNA, 21 bp, Homo sapiens
caagtactacacactccacaa

SEQ ID NO: 7149 - DNA, 21 bp, Homo sapiens
caggtgctccttagccaaata

SEQ ID NO: 7150 - DNA, 21 bp, Homo sapiens
cagctggaattccaaggccaa

SEQ ID NO: 7151 - DNA, 21 bp, Homo sapiens
cacggtattgctaccaccaaa

SEQ ID NO: 7152 - DNA, 21 bp, Homo sapiens
ctggtgttgcttgaacctcta

SEQ ID NO: 7153 - DNA, 21 bp, Homo sapiens
tagaatgtcatccgtatttca

SEQ ID NO: 7154 - DNA, 21 bp, Homo sapiens
ccggagtaaattgctagattt

SEQ ID NO: 7155 - DNA, 21 bp, Homo sapiens
ctgggatctcaacgagacaaa

SEQ ID NO: 7156 - DNA, 21 bp, Homo sapiens
caccctaattatccatattca

SEQ ID NO: 7157 - DNA, 21 bp, Homo sapiens
aagagctagcatatagatgta

SEQ ID NO: 7158 - DNA, 21 bp, Homo sapiens
ttgcattgagtgaggaacata

SEQ ID NO: 7159 - DNA, 21 bp, Homo sapiens
tagcatatagatgtaatttat

SEQ ID NO: 7160 - DNA, 21 bp, Homo sapiens
atgcccaggcttgcagaataa

SEQ ID NO: 7161 - DNA, 21 bp, Homo sapiens
ctgtaggatggtagcacacaa

SEQ ID NO: 7162 - DNA, 21 bp, Homo sapiens
taggatggtagcacacaacca

SEQ ID NO: 7163 - DNA, 21 bp, Homo sapiens
cccgccgtgcacgcagcatta

SEQ ID NO: 7164 - DNA, 21 bp, Homo sapiens
ctggttgttgtagcagcttaa

SEQ ID NO: 7165 - DNA, 21 bp, Homo sapiens
tcggttcaatgcagaagttga

SEQ ID NO: 7166 - DNA, 21 bp, Homo sapiens
aacaacaatcattagaagtaa

SEQ ID NO: 7167 - DNA, 21 bp, Homo sapiens
tcggatgtttactgacctcaa

SEQ ID NO: 7168 - DNA, 21 bp, Homo sapiens
cagagatggtgtgttctgcaa

SEQ ID NO: 7169 - DNA, 21 bp, Homo sapiens
ccggaaagagtgggacctgaa

SEQ ID NO: 7170 - DNA, 21 bp, Homo sapiens
cagggtaagaccgtgatccaa

SEQ ID NO: 7171 - DNA, 21 bp, Homo sapiens
caacttctacatcaacgacaa

SEQ ID NO: 7172 - DNA, 21 bp, Homo sapiens
cagggtaaagtgtaactcaga

SEQ ID NO: 7173 - DNA, 21 bp, Homo sapiens
gaggatctagataatattcaa

SEQ ID NO: 7174 - DNA, 21 bp, Homo sapiens
caggaacatgaacaaatcaaa

SEQ ID NO: 7175 - DNA, 21 bp, Homo sapiens
accgtgatttcgagtcccata

SEQ ID NO: 7176 - DNA, 21 bp, Homo sapiens
gggcgtcattgtcaagatcaa

SEQ ID NO: 7177 - DNA, 21 bp, Homo sapiens
aacgaatggatgaagaattta

SEQ ID NO: 7178 - DNA, 21 bp, Homo sapiens
ccgccgacgcatgatcagcaa

SEQ ID NO: 7179 - DNA, 21 bp, Homo sapiens
tcggaacatgttgcagttcaa

SEQ ID NO: 7180 - DNA, 21 bp, Homo sapiens
ccgccaagtttcagtgatgaa

SEQ ID NO: 7181 - DNA, 21 bp, Homo sapiens
cggagttgacctgatcatgaa

SEQ ID NO: 7182 - DNA, 21 bp, Homo sapiens
cacaatgagtcagaagatgaa

SEQ ID NO: 7183 - DNA, 21 bp, Homo sapiens
ccgcatgagcatcaaagccta

SEQ ID NO: 7184 - DNA, 21 bp, Homo sapiens
tacgcgtactacgacactgaa

SEQ ID NO: 7185 - DNA, 21 bp, Homo sapiens
cacgcagaacaagacagggaa

SEQ ID NO: 7186 - DNA, 21 bp, Homo sapiens
gaggtcatcaacggaaacata

SEQ ID NO: 7187 - DNA, 21 bp, Homo sapiens
cagattaagtataaccgcgaa

SEQ ID NO: 7188 - DNA, 21 bp, Homo sapiens
aagaaataaattggtttggta

SEQ ID NO: 7189 - DNA, 21 bp, Homo sapiens
ctggtgccttctcttaagtaa

SEQ ID NO: 7190 - DNA, 21 bp, Homo sapiens
aagacctttcagtatccctaa

SEQ ID NO: 7191 - DNA, 21 bp, Homo sapiens
ctgggatcagttataatatat

SEQ ID NO: 7192 - DNA, 21 bp, Homo sapiens
tccaacgtaattggtcagata

SEQ ID NO: 7193 - DNA, 21 bp, Homo sapiens
accatcattgatgttaattaa

SEQ ID NO: 7194 - DNA, 21 bp, Homo sapiens
ccggattaagcagaagatgaa

SEQ ID NO: 7195 - DNA, 21 bp, Homo sapiens
caggactttggccatctataa

SEQ ID NO: 7196 - DNA, 21 bp, Homo sapiens
cccagggatgttcagaatcaa

SEQ ID NO: 7197 - DNA, 21 bp, Homo sapiens
caggattgtcggcagtagtaa

SEQ ID NO: 7198 - DNA, 21 bp, Homo sapiens
ctgaagtttactacagtggta

SEQ ID NO: 7199 - DNA, 21 bp, Homo sapiens
ctgcattaaatggtcaataaa

SEQ ID NO: 7200 - DNA, 21 bp, Homo sapiens
ccagtgtttcagaatctccaa

SEQ ID NO: 7201 - DNA, 21 bp, Homo sapiens
tcccttgccctagatagttta

SEQ ID NO: 7202 - DNA, 21 bp, Homo sapiens
aagggctctcttaggcatgta

SEQ ID NO: 7203 - DNA, 21 bp, Homo sapiens
ctgccagtacctcaaagatta

SEQ ID NO: 7204 - DNA, 21 bp, Homo sapiens
aaagatgtgtatcgccggtta

SEQ ID NO: 7205 - DNA, 21 bp, Homo sapiens
ctgcaatagcaagaaagccta

SEQ ID NO: 7206 - DNA, 21 bp, Homo sapiens
tagggacagcttgtataatta

SEQ ID NO: 7207 - DNA, 21 bp, Homo sapiens
tacgagaaactcaatcaacta

SEQ ID NO: 7208 - DNA, 21 bp, Homo sapiens
acccatcttaattaagcctta

SEQ ID NO: 7209 - DNA, 21 bp, Homo sapiens
ttgaagttcgatcatggtaaa

SEQ ID NO: 7210 - DNA, 21 bp, Homo sapiens
ccggctcattgttctgcacta

SEQ ID NO: 7211 - DNA, 21 bp, Homo sapiens
ccggagcttccaccaccgaca

SEQ ID NO: 7212 - DNA, 21 bp, Homo sapiens
cagccggctcattgttctgca

SEQ ID NO: 7213 - DNA, 21 bp, Homo sapiens
caccgtcaaatgaaaggataa

SEQ ID NO: 7214 - DNA, 21 bp, Homo sapiens
caggtggctgttaacatctta

SEQ ID NO: 7215 - DNA, 21 bp, Homo sapiens
gagcttgttaaccataattaa

SEQ ID NO: 7216 - DNA, 21 bp, Homo sapiens
tacgttgtacacgctttgcaa

SEQ ID NO: 7217 - DNA, 21 bp, Homo sapiens
cacagtgaacttgggaatgaa

SEQ ID NO: 7218 - DNA, 21 bp, Homo sapiens
tacatattaactaataataaa

SEQ ID NO: 7219 - DNA, 21 bp, Homo sapiens
cccatggatgaccgcaaccta

SEQ ID NO: 7220 - DNA, 21 bp, Homo sapiens
cagaggtttaccaagattcaa

SEQ ID NO: 7221 - DNA, 21 bp, Homo sapiens
atggaagtatttacaatgaaa

SEQ ID NO: 7222 - DNA, 21 bp, Homo sapiens
aaccgtggatttcatattata

SEQ ID NO: 7223 - DNA, 21 bp, Homo sapiens
cagagttaagaggaagattta

SEQ ID NO: 7224 - DNA, 21 bp, Homo sapiens
cacactggatgtgattattaa

SEQ ID NO: 7225 - DNA, 21 bp, Homo sapiens
aaagagctactatacatcata

SEQ ID NO: 7226 - DNA, 21 bp, Homo sapiens
ccctattacatacatctttca

SEQ ID NO: 7227 - DNA, 21 bp, Homo sapiens
atcggtcatgatgaacttgga

SEQ ID NO: 7228 - DNA, 21 bp, Homo sapiens
aaggatctagtctgcccacta

SEQ ID NO: 7229 - DNA, 21 bp, Homo sapiens
cagggtcagcctgtagtgaat

SEQ ID NO: 7230 - DNA, 21 bp, Homo sapiens
ccgaatgttaagcaatgataa

SEQ ID NO: 7231 - DNA, 21 bp, Homo sapiens
cccgaatgttaagcaatgata

SEQ ID NO: 7232 - DNA, 21 bp, Homo sapiens
agcaatgataataaagtataa

SEQ ID NO: 7233 - DNA, 21 bp, Homo sapiens
gagaaccaccataattctgaa

SEQ ID NO: 7234 - DNA, 21 bp, Homo sapiens
cacaagaagattggtctgttt

SEQ ID NO: 7235 - DNA, 21 bp, Homo sapiens
caccgtccagttggtgggtaa

SEQ ID NO: 7236 - DNA, 21 bp, Homo sapiens
cgcggtattaaatctgtgaaa

SEQ ID NO: 7237 - DNA, 21 bp, Homo sapiens
cacaggaagaattgtagataa

SEQ ID NO: 7238 - DNA, 21 bp, Homo sapiens
cagaacggagacaacattgaa

SEQ ID NO: 7239 - DNA, 21 bp, Homo sapiens
cagaacagacttcaacagtaa

SEQ ID NO: 7240 - DNA, 21 bp, Homo sapiens
cagggataatttaaggatgaa

SEQ ID NO: 7241 - DNA, 21 bp, Homo sapiens
cggacgggccatacccaataa

SEQ ID NO: 7242 - DNA, 21 bp, Homo sapiens
ctagggcgaaatgaacacaaa

SEQ ID NO: 7243 - DNA, 21 bp, Homo sapiens
cagaaggacctggccacgaaa

SEQ ID NO: 7244 - DNA, 21 bp, Homo sapiens
cacggtgacggtgctgcgcaa

SEQ ID NO: 7245 - DNA, 21 bp, Homo sapiens
cctgtccgtctttgtcaataa

SEQ ID NO: 7246 - DNA, 21 bp, Homo sapiens
cggacatatgagtcaaaggaa

SEQ ID NO: 7247 - DNA, 21 bp, Homo sapiens
cacctttgttgaattgtggta

SEQ ID NO: 7248 - DNA, 21 bp, Homo sapiens
cccaatctccgtggccatcaa

SEQ ID NO: 7249 - DNA, 21 bp, Homo sapiens
aacattatgcagatcagttaa

SEQ ID NO: 7250 - DNA, 21 bp, Homo sapiens
tacctagtatacataaacata

SEQ ID NO: 7251 - DNA, 21 bp, Homo sapiens
cccatcctttgtagagacaaa

SEQ ID NO: 7252 - DNA, 21 bp, Homo sapiens
ctcgttatttctaatgatgta

SEQ ID NO: 7253 - DNA, 21 bp, Homo sapiens
acccttcacatggaagattaa

SEQ ID NO: 7254 - DNA, 21 bp, Homo sapiens
caagatgaaataatagataaa

SEQ ID NO: 7255 - DNA, 21 bp, Homo sapiens
aaagagggtttcaaagtttaa

SEQ ID NO: 7256 - DNA, 21 bp, Homo sapiens
ctggaaagaataccactttaa

SEQ ID NO: 7257 - DNA, 21 bp, Homo sapiens
aaggaatcttatgattataat

SEQ ID NO: 7258 - DNA, 21 bp, Homo sapiens
aagcaacagagttaccttgta

SEQ ID NO: 7259 - DNA, 21 bp, Homo sapiens
aggcataattaggataataaa

SEQ ID NO: 7260 - DNA, 21 bp, Homo sapiens
ctgaacgccctgatacaccta

SEQ ID NO: 7261 - DNA, 21 bp, Homo sapiens
ctgcagagggtttaaagctta

SEQ ID NO: 7262 - DNA, 21 bp, Homo sapiens
cggatgggtctcagttacaaa

SEQ ID NO: 7263 - DNA, 21 bp, Homo sapiens
acgcttattaatcataaagat

SEQ ID NO: 7264 - DNA, 21 bp, Homo sapiens
aagcttgggaatcccaaatta

SEQ ID NO: 7265 - DNA, 21 bp, Homo sapiens
aagaatatttacatcattcaa

SEQ ID NO: 7266 - DNA, 21 bp, Homo sapiens
acgggaactaattgaaattaa

SEQ ID NO: 7267 - DNA, 21 bp, Homo sapiens
ctggtcttaattaacaggtaa

SEQ ID NO: 7268 - DNA, 21 bp, Homo sapiens
cagggtgactctccaaagaaa

SEQ ID NO: 7269 - DNA, 21 bp, Homo sapiens
caccaactaatgacactttaa

SEQ ID NO: 7270 - DNA, 21 bp, Homo sapiens
caggtctttcactcatataaa

SEQ ID NO: 7271 - DNA, 21 bp, Homo sapiens
agcgagcaacaggttggtgaa

SEQ ID NO: 7272 - DNA, 21 bp, Homo sapiens
atacagctctatatatataaa

SEQ ID NO: 7273 - DNA, 21 bp, Homo sapiens
cgagaaggaagtggagagtaa

SEQ ID NO: 7274 - DNA, 21 bp, Homo sapiens
agcgatcgtagaaacacagaa

SEQ ID NO: 7275 - DNA, 21 bp, Homo sapiens
taccacaaacattgtcattaa

SEQ ID NO: 7276 - DNA, 21 bp, Homo sapiens
caggaatatgtcgtccaccta

SEQ ID NO: 7277 - DNA, 21 bp, Homo sapiens
cagggacttgatcatgaaaga

SEQ ID NO: 7278 - DNA, 21 bp, Homo sapiens
ccaggcttaattgccctacaa

SEQ ID NO: 7279 - DNA, 21 bp, Homo sapiens
cacaaggacatcgacctgtta

SEQ ID NO: 7280 - DNA, 21 bp, Homo sapiens
acgtatgatctctctaataga

SEQ ID NO: 7281 - DNA, 21 bp, Homo sapiens
tcctaaggtaatcctattaaa

SEQ ID NO: 7282 - DNA, 21 bp, Homo sapiens
caggacgaattgagataatat

SEQ ID NO: 7283 - DNA, 21 bp, Homo sapiens
cagcgggatctcgtatcttta

SEQ ID NO: 7284 - DNA, 21 bp, Homo sapiens
agcgggatctcgtatctttaa

SEQ ID NO: 7285 - DNA, 21 bp, Homo sapiens
aagaggttgttacctcagtaa

SEQ ID NO: 7286 - DNA, 21 bp, Homo sapiens
taccacatgaattcagattta

SEQ ID NO: 7287 - DNA, 21 bp, Homo sapiens
caggcctattaacatcataca

SEQ ID NO: 7288 - DNA, 21 bp, Homo sapiens
ctggcaaggcttataagacaa

SEQ ID NO: 7289 - DNA, 21 bp, Homo sapiens
ccgggaatgcaagttgatgaa

SEQ ID NO: 7290 - DNA, 21 bp, Homo sapiens
caccgagtcggtgaaggaata

SEQ ID NO: 7291 - DNA, 21 bp, Homo sapiens
ttgtggcaatgttaacattaa

SEQ ID NO: 7292 - DNA, 21 bp, Homo sapiens
ctcggagatcaagacaagcaa

SEQ ID NO: 7293 - DNA, 21 bp, Homo sapiens
aaaggttgttgtgaacattaa

SEQ ID NO: 7294 - DNA, 21 bp, Homo sapiens
caggaacggcatagccctaga

SEQ ID NO: 7295 - DNA, 21 bp, Homo sapiens
cagcagaagtgggtgcaggaa

SEQ ID NO: 7296 - DNA, 21 bp, Homo sapiens
ccctgggaacaagacccacaa

SEQ ID NO: 7297 - DNA, 21 bp, Homo sapiens
tcgggattctcaggtcatgaa

SEQ ID NO: 7298 - DNA, 21 bp, Homo sapiens
caggagggagagagagacaca

SEQ ID NO: 7299 - DNA, 21 bp, Homo sapiens
aagctattgaccctcaggaaa

SEQ ID NO: 7300 - DNA, 21 bp, Homo sapiens
aacgatgggccttcaacttca

SEQ ID NO: 7301 - DNA, 21 bp, Homo sapiens
caaataggtgtttgaactgta

SEQ ID NO: 7302 - DNA, 21 bp, Homo sapiens
ctgacaccagtttcaaattta

SEQ ID NO: 7303 - DNA, 21 bp, Homo sapiens
cccagtgtgtgttcattgtaa

SEQ ID NO: 7304 - DNA, 21 bp, Homo sapiens
taagtttgtgtcgttccttaa

SEQ ID NO: 7305 - DNA, 21 bp, Homo sapiens
cccgctaggtggttaatttat

SEQ ID NO: 7306 - DNA, 21 bp, Homo sapiens
acccgctaggtggttaattta

SEQ ID NO: 7307 - DNA, 21 bp, Homo sapiens
caggaactttccggaatgaca

SEQ ID NO: 7308 - DNA, 21 bp, Homo sapiens
caggcaatggacataatatat

SEQ ID NO: 7309 - DNA, 21 bp, Homo sapiens
ccgggtccacaagaccttcaa

SEQ ID NO: 7310 - DNA, 21 bp, Homo sapiens
atcaaacttcatgatcaatca

SEQ ID NO: 7311 - DNA, 21 bp, Homo sapiens
acacggctcctgagaaattta

SEQ ID NO: 7312 - DNA, 21 bp, Homo sapiens
cagatgctttcggtagagaaa

SEQ ID NO: 7313 - DNA, 21 bp, Homo sapiens
ctgcatcacggcggagttgta

SEQ ID NO: 7314 - DNA, 21 bp, Homo sapiens
ctccatatgaacaaagtgaaa

SEQ ID NO: 7315 - DNA, 21 bp, Homo sapiens
caacatctctatgttgataaa

SEQ ID NO: 7316 - DNA, 21 bp, Homo sapiens
atggatcacgtagacatgtaa

SEQ ID NO: 7317 - DNA, 21 bp, Homo sapiens
agcggtaacctggtacaagaa

SEQ ID NO: 7318 - DNA, 21 bp, Homo sapiens
atcgtagtggatgaagtttat

SEQ ID NO: 7319 - DNA, 21 bp, Homo sapiens
cccagtatctttgaactacaa

SEQ ID NO: 7320 - DNA, 21 bp, Homo sapiens
cccagcctaaggaatggtgaa

SEQ ID NO: 7321 - DNA, 21 bp, Homo sapiens
caggagtctaccaatgtgtta

SEQ ID NO: 7322 - DNA, 21 bp, Homo sapiens
taggtggtttaccaaatttat

SEQ ID NO: 7323 - DNA, 21 bp, Homo sapiens
tgggtccaataaagtggtata

SEQ ID NO: 7324 - DNA, 21 bp, Homo sapiens
aaggactgtaacgagattaaa

SEQ ID NO: 7325 - DNA, 21 bp, Homo sapiens
cgagaagagatgaaacattaa

SEQ ID NO: 7326 - DNA, 21 bp, Homo sapiens
ccgagtcttaatcttcagaaa

SEQ ID NO: 7327 - DNA, 21 bp, Homo sapiens
aagagtgagattgtcagtgta

SEQ ID NO: 7328 - DNA, 21 bp, Homo sapiens
ttgctattgcatagtctctaa

SEQ ID NO: 7329 - DNA, 21 bp, Homo sapiens
ctgcaccttcgtcttcagcta

SEQ ID NO: 7330 - DNA, 21 bp, Homo sapiens
gacggttgatgtggcctgaaa

SEQ ID NO: 7331 - DNA, 21 bp, Homo sapiens
taccaacctgttcatccttaa

SEQ ID NO: 7332 - DNA, 21 bp, Homo sapiens
cccgctcacgcgcgccactta

SEQ ID NO: 7333 - DNA, 21 bp, Homo sapiens
cagccatattggctcaataaa

SEQ ID NO: 7334 - DNA, 21 bp, Homo sapiens
ctcaataaatagcttcggtaa

SEQ ID NO: 7335 - DNA, 21 bp, Homo sapiens
atcctggatctttactcacaa

SEQ ID NO: 7336 - DNA, 21 bp, Homo sapiens
aagcaactcaaaggtgataaa

SEQ ID NO: 7337 - DNA, 21 bp, Homo sapiens
ctggttaacttgagaagccaa

SEQ ID NO: 7338 - DNA, 21 bp, Homo sapiens
tagaattactttggatttgta

SEQ ID NO: 7339 - DNA, 21 bp, Homo sapiens
tagcctgatcatcttcaccta

SEQ ID NO: 7340 - DNA, 21 bp, Homo sapiens
cagcatgtcatccacaagtat

SEQ ID NO: 7341 - DNA, 21 bp, Homo sapiens
ctccatagatttgaaacagaa

SEQ ID NO: 7342 - DNA, 21 bp, Homo sapiens
atcgatgtcagtgacacttga

SEQ ID NO: 7343 - DNA, 21 bp, Homo sapiens
cccggaaagtgtgagcggaaa

SEQ ID NO: 7344 - DNA, 21 bp, Homo sapiens
aacgatttgccgcaaactgaa

SEQ ID NO: 7345 - DNA, 21 bp, Homo sapiens
ctggaggtggctgtcctcaaa

SEQ ID NO: 7346 - DNA, 21 bp, Homo sapiens
ctgctgattctctgctgtcaa

SEQ ID NO: 7347 - DNA, 21 bp, Homo sapiens
cgcaagtactgtggacaagaa

SEQ ID NO: 7348 - DNA, 21 bp, Homo sapiens
ctggtctgtcataagacagaa

SEQ ID NO: 7349 - DNA, 21 bp, Homo sapiens
ctcgtgatatttgtaggataa

SEQ ID NO: 7350 - DNA, 21 bp, Homo sapiens
caggctctgaagattgctcaa

SEQ ID NO: 7351 - DNA, 21 bp, Homo sapiens
cagagcagtggtaccctgtaa

SEQ ID NO: 7352 - DNA, 21 bp, Homo sapiens
acgaacgaagtcacaacccaa

SEQ ID NO: 7353 - DNA, 21 bp, Homo sapiens
cccggctgatgcaaagcttta

SEQ ID NO: 7354 - DNA, 21 bp, Homo sapiens
acgcttgccactaaagccata

SEQ ID NO: 7355 - DNA, 21 bp, Homo sapiens
ctgggacttcaagctatgaaa

SEQ ID NO: 7356 - DNA, 21 bp, Homo sapiens
acccacagaaattattatgaa

SEQ ID NO: 7357 - DNA, 21 bp, Homo sapiens
ctcagaaatcttcacagtgaa

SEQ ID NO: 7358 - DNA, 21 bp, Homo sapiens
cagaatgtgggctgcatataa

SEQ ID NO: 7359 - DNA, 21 bp, Homo sapiens
atgccgtaataaagtcatgaa

SEQ ID NO: 7360 - DNA, 21 bp, Homo sapiens
aagcattgatttatcagttca

SEQ ID NO: 7361 - DNA, 21 bp, Homo sapiens
tcagtccaatttatactggaa

SEQ ID NO: 7362 - DNA, 21 bp, Homo sapiens
ctggctctgattcttcattat

SEQ ID NO: 7363 - DNA, 21 bp, Homo sapiens
aactttcaataaagcatataa

SEQ ID NO: 7364 - DNA, 21 bp, Homo sapiens
ctcactttgtgtaatctgaaa

SEQ ID NO: 7365 - DNA, 21 bp, Homo sapiens
cacatgcactactgaaattta

SEQ ID NO: 7366 - DNA, 21 bp, Homo sapiens
ctggtcatcagtattgtgtaa

SEQ ID NO: 7367 - DNA, 21 bp, Homo sapiens
tgagctggtttgactcattaa

SEQ ID NO: 7368 - DNA, 21 bp, Homo sapiens
ccggaaggccacgctgtttga

SEQ ID NO: 7369 - DNA, 21 bp, Homo sapiens
ctgccttatcatggctaagta

SEQ ID NO: 7370 - DNA, 21 bp, Homo sapiens
caagactctcttggacatgaa

SEQ ID NO: 7371 - DNA, 21 bp, Homo sapiens
tacagtgtctatgccgatcaa

SEQ ID NO: 7372 - DNA, 21 bp, Homo sapiens
gtcggtgaacacattctcaaa

SEQ ID NO: 7373 - DNA, 21 bp, Homo sapiens
tgggcgtttggtaaacaagaa

SEQ ID NO: 7374 - DNA, 21 bp, Homo sapiens
atggctactttcaatacaata

SEQ ID NO: 7375 - DNA, 21 bp, Homo sapiens
aggagctttgctgtcatttaa

SEQ ID NO: 7376 - DNA, 21 bp, Homo sapiens
cagcaataacttacctgctaa

SEQ ID NO: 7377 - DNA, 21 bp, Homo sapiens
aaagaacttcttgaatcacta

SEQ ID NO: 7378 - DNA, 21 bp, Homo sapiens
tagaatatggtttgaccaata

SEQ ID NO: 7379 - DNA, 21 bp, Homo sapiens
cccatgcacttcggtcacgaa

SEQ ID NO: 7380 - DNA, 21 bp, Homo sapiens
atagtggaataaagaaggtaa

SEQ ID NO: 7381 - DNA, 21 bp, Homo sapiens
gaggaagatctcagaaatgaa

SEQ ID NO: 7382 - DNA, 21 bp, Homo sapiens
ctggaggacatgaacagagaa

SEQ ID NO: 7383 - DNA, 21 bp, Homo sapiens
caggtattggttcgtttacaa

SEQ ID NO: 7384 - DNA, 21 bp, Homo sapiens
atggattgtgatcatagctaa

SEQ ID NO: 7385 - DNA, 21 bp, Homo sapiens
caggagcatttacggatttaa

SEQ ID NO: 7386 - DNA, 21 bp, Homo sapiens
ctgagtgaagatggtcagata

SEQ ID NO: 7387 - DNA, 21 bp, Homo sapiens
cttgtatatgttaatattaaa

SEQ ID NO: 7388 - DNA, 21 bp, Homo sapiens
caaagtgaagatgaaaggtta

SEQ ID NO: 7389 - DNA, 21 bp, Homo sapiens
atgagagaagctgaaacagaa

SEQ ID NO: 7390 - DNA, 21 bp, Homo sapiens
cagcagagaactctatgaata

SEQ ID NO: 7391 - DNA, 21 bp, Homo sapiens
caagcaagggtttgacatcta

SEQ ID NO: 7392 - DNA, 21 bp, Homo sapiens
aagcaattagggagaagtaca

SEQ ID NO: 7393 - DNA, 21 bp, Homo sapiens
ttcgaaatatgaagagatata

SEQ ID NO: 7394 - DNA, 21 bp, Homo sapiens
caccgatgatacatacacaaa

SEQ ID NO: 7395 - DNA, 21 bp, Homo sapiens
atggcattagatggctctata

SEQ ID NO: 7396 - DNA, 21 bp, Homo sapiens
atggcacatcatatacatgta

SEQ ID NO: 7397 - DNA, 21 bp, Homo sapiens
aagggaactttagttaattaa

SEQ ID NO: 7398 - DNA, 21 bp, Homo sapiens
caggcagtatacatttattaa

SEQ ID NO: 7399 - DNA, 21 bp, Homo sapiens
ccgccaggtggtgtccatcta

SEQ ID NO: 7400 - DNA, 21 bp, Homo sapiens
cccacaaataaagcccaataa

SEQ ID NO: 7401 - DNA, 21 bp, Homo sapiens
caggtaaatggtatccctgaa

SEQ ID NO: 7402 - DNA, 21 bp, Homo sapiens
taacatttaatacaaatttaa

SEQ ID NO: 7403 - DNA, 21 bp, Homo sapiens
ccggctcatgggatcagtaaa

SEQ ID NO: 7404 - DNA, 21 bp, Homo sapiens
cagccgcatcatcaagaacaa

SEQ ID NO: 7405 - DNA, 21 bp, Homo sapiens
gaggtggaagtccaagtcaaa

SEQ ID NO: 7406 - DNA, 21 bp, Homo sapiens
caagaggtggttaaagccata

SEQ ID NO: 7407 - DNA, 21 bp, Homo sapiens
acccttcaggtgttactagaa

SEQ ID NO: 7408 - DNA, 21 bp, Homo sapiens
ctcgcgagtgtaactttcata

SEQ ID NO: 7409 - DNA, 21 bp, Homo sapiens
tggaaagatgatgcctagtaa

SEQ ID NO: 7410 - DNA, 21 bp, Homo sapiens
aagatgatgcctagtaaatta

SEQ ID NO: 7411 - DNA, 21 bp, Homo sapiens
tacactcagaaagtacattta

SEQ ID NO: 7412 - DNA, 21 bp, Homo sapiens
ttgcttgcctataggagttaa

SEQ ID NO: 7413 - DNA, 21 bp, Homo sapiens
gccctataaccgattaattaa

SEQ ID NO: 7414 - DNA, 21 bp, Homo sapiens
caagaacgtgtggaccgttta

SEQ ID NO: 7415 - DNA, 21 bp, Homo sapiens
ctcgcctgactccatccagaa

SEQ ID NO: 7416 - DNA, 21 bp, Homo sapiens
cagccagaggacccaggtgaa

SEQ ID NO: 7417 - DNA, 21 bp, Homo sapiens
gtcgaccttgctggacattaa

SEQ ID NO: 7418 - DNA, 21 bp, Homo sapiens
tgggatcatgacgacgatgta

SEQ ID NO: 7419 - DNA, 21 bp, Homo sapiens
cacggagaagaaagaagctaa

SEQ ID NO: 7420 - DNA, 21 bp, Homo sapiens
cacggacacagacatctgtaa

SEQ ID NO: 7421 - DNA, 21 bp, Homo sapiens
ccacatgtaactaacaataaa

SEQ ID NO: 7422 - DNA, 21 bp, Homo sapiens
cagatttaagatggataacaa

SEQ ID NO: 7423 - DNA, 21 bp, Homo sapiens
ctggtttcaggtggaacttaa

SEQ ID NO: 7424 - DNA, 21 bp, Homo sapiens
ctggaggcagatgacatctaa

SEQ ID NO: 7425 - DNA, 21 bp, Homo sapiens
ctgggctagaataaatgtaaa

SEQ ID NO: 7426 - DNA, 21 bp, Homo sapiens
caggatgagcaacaacagtaa

SEQ ID NO: 7427 - DNA, 21 bp, Homo sapiens
tcggcatgatatgaattggaa

SEQ ID NO: 7428 - DNA, 21 bp, Homo sapiens
ctggcccatatttaacagaga

SEQ ID NO: 7429 - DNA, 21 bp, Homo sapiens
cccaatggaaacggaactaat

SEQ ID NO: 7430 - DNA, 21 bp, Homo sapiens
tgggaggaataatatacctaa

SEQ ID NO: 7431 - DNA, 21 bp, Homo sapiens
atgctacatatgaatgttgaa

SEQ ID NO: 7432 - DNA, 21 bp, Homo sapiens
cacattgagtaatatgcataa

SEQ ID NO: 7433 - DNA, 21 bp, Homo sapiens
cagatacgacagggtatccaa

SEQ ID NO: 7434 - DNA, 21 bp, Homo sapiens
aaccttaatgtaatttactta

SEQ ID NO: 7435 - DNA, 21 bp, Homo sapiens
cggccaggagttcgcagtcaa

SEQ ID NO: 7436 - DNA, 21 bp, Homo sapiens
aaggagataggtggctcctaa

SEQ ID NO: 7437 - DNA, 21 bp, Homo sapiens
cgccaccttcatggcattcaa

SEQ ID NO: 7438 - DNA, 21 bp, Homo sapiens
caggctgtgcctttgacttta

SEQ ID NO: 7439 - DNA, 21 bp, Homo sapiens
cagtagacagttgcacattaa

SEQ ID NO: 7440 - DNA, 21 bp, Homo sapiens
ccacgaattcatatctaataa

SEQ ID NO: 7441 - DNA, 21 bp, Homo sapiens
cacgaattcatatctaataaa

SEQ ID NO: 7442 - DNA, 21 bp, Homo sapiens
ctggttctaactttcaattta

SEQ ID NO: 7443 - DNA, 21 bp, Homo sapiens
aacgttaacagcacatttgaa

SEQ ID NO: 7444 - DNA, 21 bp, Homo sapiens
aaccctctctttggaccgcaa

SEQ ID NO: 7445 - DNA, 21 bp, Homo sapiens
ctggtgcgacgtgggctacaa

SEQ ID NO: 7446 - DNA, 21 bp, Homo sapiens
cagcttcatgggcaactacat

SEQ ID NO: 7447 - DNA, 21 bp, Homo sapiens
tggcatcagcttcatgggcaa

SEQ ID NO: 7448 - DNA, 21 bp, Homo sapiens
gaggtccaactatgtgctcaa

SEQ ID NO: 7449 - DNA, 21 bp, Homo sapiens
cccagtaccgctggaagtgaa

SEQ ID NO: 7450 - DNA, 21 bp, Homo sapiens
accctggagatcccaaaccta

SEQ ID NO: 7451 - DNA, 21 bp, Homo sapiens
tgcgagaaatcaagttactaa

SEQ ID NO: 7452 - DNA, 21 bp, Homo sapiens
tcaggcatttataacattaat

SEQ ID NO: 7453 - DNA, 21 bp, Homo sapiens
ttctacggactttaaattaaa

SEQ ID NO: 7454 - DNA, 21 bp, Homo sapiens
atgatgtgtttaggtaatcta

SEQ ID NO: 7455 - DNA, 21 bp, Homo sapiens
caggctggtgcccgccctcta

SEQ ID NO: 7456 - DNA, 21 bp, Homo sapiens
acgcgtgaaacacagaagaaa

SEQ ID NO: 7457 - DNA, 21 bp, Homo sapiens
cacattcacgatactgtgcaa

SEQ ID NO: 7458 - DNA, 21 bp, Homo sapiens
aaggctgtactgggtcgaaca

SEQ ID NO: 7459 - DNA, 21 bp, Homo sapiens
aagcaagatcaccaaatctta

SEQ ID NO: 7460 - DNA, 21 bp, Homo sapiens
ccggatgcactaagaatataa

SEQ ID NO: 7461 - DNA, 21 bp, Homo sapiens
ctggttgcagataacgaacta

SEQ ID NO: 7462 - DNA, 21 bp, Homo sapiens
ccagtcatatatgcacagtta

SEQ ID NO: 7463 - DNA, 21 bp, Homo sapiens
caccttctttataaagcgtca

SEQ ID NO: 7464 - DNA, 21 bp, Homo sapiens
aaggcattacttagagattga

SEQ ID NO: 7465 - DNA, 21 bp, Homo sapiens
cagcctgtgataggcattcaa

SEQ ID NO: 7466 - DNA, 21 bp, Homo sapiens
atggacaattatggacaacaa

SEQ ID NO: 7467 - DNA, 21 bp, Homo sapiens
ctccgacatgctgtacttcaa

SEQ ID NO: 7468 - DNA, 21 bp, Homo sapiens
aagtgttctgttggcaataaa

SEQ ID NO: 7469 - DNA, 21 bp, Homo sapiens
ccgctggtacttctaccgtca

SEQ ID NO: 7470 - DNA, 21 bp, Homo sapiens
tgggatgagatgtccctacaa

SEQ ID NO: 7471 - DNA, 21 bp, Homo sapiens
caggctcagcagattaccaca

SEQ ID NO: 7472 - DNA, 21 bp, Homo sapiens
cccactggtctttgacatctt

SEQ ID NO: 7473 - DNA, 21 bp, Homo sapiens
ctgcctcattatgatcagctt

SEQ ID NO: 7474 - DNA, 21 bp, Homo sapiens
caccatagacacgatggtcga

SEQ ID NO: 7475 - DNA, 21 bp, Homo sapiens
cagattgatagtaggattata

SEQ ID NO: 7476 - DNA, 21 bp, Homo sapiens
caccagaagtatgtccgacaa

SEQ ID NO: 7477 - DNA, 21 bp, Homo sapiens
tgggtgagtcaccatcccaaa

SEQ ID NO: 7478 - DNA, 21 bp, Homo sapiens
gacaatgttgtactaaagaaa

SEQ ID NO: 7479 - DNA, 21 bp, Homo sapiens
cagcagacgtttggaaagaaa

SEQ ID NO: 7480 - DNA, 21 bp, Homo sapiens
cagatttcttggtggcattaa

SEQ ID NO: 7481 - DNA, 21 bp, Homo sapiens
ctggtgttgatagagatggaa

SEQ ID NO: 7482 - DNA, 21 bp, Homo sapiens
ccggtgggtgatggatatcat

SEQ ID NO: 7483 - DNA, 21 bp, Homo sapiens
cccgaacaggtgaagggacaa

SEQ ID NO: 7484 - DNA, 21 bp, Homo sapiens
cagcatttgaaggacacatat

SEQ ID NO: 7485 - DNA, 21 bp, Homo sapiens
acgaataaacttcttccggaa

SEQ ID NO: 7486 - DNA, 21 bp, Homo sapiens
ctcagtggtgcaagatttaaa

SEQ ID NO: 7487 - DNA, 21 bp, Homo sapiens
ccggctagtgcttctgtgata

SEQ ID NO: 7488 - DNA, 21 bp, Homo sapiens
ccacgttatgtcagcaatgaa

SEQ ID NO: 7489 - DNA, 21 bp, Homo sapiens
aagctgttgtacggcgcacaa

SEQ ID NO: 7490 - DNA, 21 bp, Homo sapiens
aagggctgtatctccatctaa

SEQ ID NO: 7491 - DNA, 21 bp, Homo sapiens
gtgctccttcttagcaatcaa

SEQ ID NO: 7492 - DNA, 21 bp, Homo sapiens
caggcatatggtctttagtaa

SEQ ID NO: 7493 - DNA, 21 bp, Homo sapiens
cccttcttgcttaaatccata

SEQ ID NO: 7494 - DNA, 21 bp, Homo sapiens
atcagatatttggaatattta

SEQ ID NO: 7495 - DNA, 21 bp, Homo sapiens
tagagagacatgaaactatca

SEQ ID NO: 7496 - DNA, 21 bp, Homo sapiens
caggtgctggatgacaataaa

SEQ ID NO: 7497 - DNA, 21 bp, Homo sapiens
caggaactgaatgtggattca

SEQ ID NO: 7498 - DNA, 21 bp, Homo sapiens
taccagacaaagcgtattaaa

SEQ ID NO: 7499 - DNA, 21 bp, Homo sapiens
tcagaggagctgagtaatgaa

SEQ ID NO: 7500 - DNA, 21 bp, Homo sapiens
caccatccaaatgctgttgaa

SEQ ID NO: 7501 - DNA, 21 bp, Homo sapiens
gaggcgggtcatactccttaa

SEQ ID NO: 7502 - DNA, 21 bp, Homo sapiens
cagaaagtttggacagcttta

SEQ ID NO: 7503 - DNA, 21 bp, Homo sapiens
ctcgtgttactcaactctata

SEQ ID NO: 7504 - DNA, 21 bp, Homo sapiens
cgggagatagatgttctgcaa

SEQ ID NO: 7505 - DNA, 21 bp, Homo sapiens
aaggctaagggctatagacaa

SEQ ID NO: 7506 - DNA, 21 bp, Homo sapiens
ccagactaatttgtgcatgaa

SEQ ID NO: 7507 - DNA, 21 bp, Homo sapiens
aaggactcagagagacatgaa

SEQ ID NO: 7508 - DNA, 21 bp, Homo sapiens
aagaaggatcttaaagactca

SEQ ID NO: 7509 - DNA, 21 bp, Homo sapiens
ttggctttcatgaacaagtaa

SEQ ID NO: 7510 - DNA, 21 bp, Homo sapiens
accataatatttgctgttaaa

SEQ ID NO: 7511 - DNA, 21 bp, Homo sapiens
ctcctacggagaggtcttcaa

SEQ ID NO: 7512 - DNA, 21 bp, Homo sapiens
ctgcctggccgtgtctaataa

SEQ ID NO: 7513 - DNA, 21 bp, Homo sapiens
ctgggaggaacttaccgtcta

SEQ ID NO: 7514 - DNA, 21 bp, Homo sapiens
ccggccagagtccttcttcca

SEQ ID NO: 7515 - DNA, 21 bp, Homo sapiens
acgctgctgtgtgctcctgaa

SEQ ID NO: 7516 - DNA, 21 bp, Homo sapiens
caggtgttgctgtcacagcta

SEQ ID NO: 7517 - DNA, 21 bp, Homo sapiens
ctcaaccttcatattaaataa

SEQ ID NO: 7518 - DNA, 21 bp, Homo sapiens
cccgtgtacagtgacccagaa

SEQ ID NO: 7519 - DNA, 21 bp, Homo sapiens
tcgcctgaagatagataggaa

SEQ ID NO: 7520 - DNA, 21 bp, Homo sapiens
cagcaatgccttcgccactaa

SEQ ID NO: 7521 - DNA, 21 bp, Homo sapiens
cacggaaagaagcacttgtaa

SEQ ID NO: 7522 - DNA, 21 bp, Homo sapiens
aaggctcgtattcatgcagaa

SEQ ID NO: 7523 - DNA, 21 bp, Homo sapiens
caggttcaggcaagccattta

SEQ ID NO: 7524 - DNA, 21 bp, Homo sapiens
cagggtcaattcaaatctaca

SEQ ID NO: 7525 - DNA, 21 bp, Homo sapiens
ccggctgcatatcaaattcaa

SEQ ID NO: 7526 - DNA, 21 bp, Homo sapiens
aagagtggctctcacggctaa

SEQ ID NO: 7527 - DNA, 21 bp, Homo sapiens
ttgccatagatgtaacctaaa

SEQ ID NO: 7528 - DNA, 21 bp, Homo sapiens
tcggcactggagagtaccaaa

SEQ ID NO: 7529 - DNA, 21 bp, Homo sapiens
cactttcatgttcctccctaa

SEQ ID NO: 7530 - DNA, 21 bp, Homo sapiens
ccgcgccttcatcatcaccat

SEQ ID NO: 7531 - DNA, 21 bp, Homo sapiens
cagctaaataatcttactcta

SEQ ID NO: 7532 - DNA, 21 bp, Homo sapiens
cagcctattcctgaactataa

SEQ ID NO: 7533 - DNA, 21 bp, Homo sapiens
aaccggttaccaatcgataaa

SEQ ID NO: 7534 - DNA, 21 bp, Homo sapiens
tacccaggaactgtaaattta

SEQ ID NO: 7535 - DNA, 21 bp, Homo sapiens
gaggactaagttggagcttaa

SEQ ID NO: 7536 - DNA, 21 bp, Homo sapiens
atggaggatatcgaacgccaa

SEQ ID NO: 7537 - DNA, 21 bp, Homo sapiens
gacgattacattgacaaccat

SEQ ID NO: 7538 - DNA, 21 bp, Homo sapiens
ctggtactactatgacagtat

SEQ ID NO: 7539 - DNA, 21 bp, Homo sapiens
cgggcatctctgagactcaaa

SEQ ID NO: 7540 - DNA, 21 bp, Homo sapiens
ccgctccatcaggattctcaa

SEQ ID NO: 7541 - DNA, 21 bp, Homo sapiens
ctggaggaaactgcacaggaa

SEQ ID NO: 7542 - DNA, 21 bp, Homo sapiens
cactcttatcctccttattta

SEQ ID NO: 7543 - DNA, 21 bp, Homo sapiens
cagcagctctgagaacggcaa

SEQ ID NO: 7544 - DNA, 21 bp, Homo sapiens
tcggaaagtgctgtccctgaa

SEQ ID NO: 7545 - DNA, 21 bp, Homo sapiens
atggtatgtagtagaattcaa

SEQ ID NO: 7546 - DNA, 21 bp, Homo sapiens
cagcttcgatttgaatgacta

SEQ ID NO: 7547 - DNA, 21 bp, Homo sapiens
cagaacaaggtttaatagaaa

SEQ ID NO: 7548 - DNA, 21 bp, Homo sapiens
caagtctaggacagaagttaa

SEQ ID NO: 7549 - DNA, 21 bp, Homo sapiens
tacgagcagctgaacaggaaa

SEQ ID NO: 7550 - DNA, 21 bp, Homo sapiens
cacgtccggagtaacactaca

SEQ ID NO: 7551 - DNA, 21 bp, Homo sapiens
gcacgtctttccagaattcaa

SEQ ID NO: 7552 - DNA, 21 bp, Homo sapiens
ccggaacgagcccaagtacaa

SEQ ID NO: 7553 - DNA, 21 bp, Homo sapiens
acggagatgaagtactatata

SEQ ID NO: 7554 - DNA, 21 bp, Homo sapiens
ctcgctgaacctgacccggaa

SEQ ID NO: 7555 - DNA, 21 bp, Homo sapiens
ccggacctaccgctacagcaa

SEQ ID NO: 7556 - DNA, 21 bp, Homo sapiens
cacggagatgaagtactatat

SEQ ID NO: 7557 - DNA, 21 bp, Homo sapiens
ccgaatattatcaagggatga

SEQ ID NO: 7558 - DNA, 21 bp, Homo sapiens
cccgacaaacttcccgataga

SEQ ID NO: 7559 - DNA, 21 bp, Homo sapiens
ctccatggtttgcattattga

SEQ ID NO: 7560 - DNA, 21 bp, Homo sapiens
ccggctgtacgcacacaccat

SEQ ID NO: 7561 - DNA, 21 bp, Homo sapiens
gaacgagtgattagtactaaa

SEQ ID NO: 7562 - DNA, 21 bp, Homo sapiens
agggttaaatctcccaaggaa

SEQ ID NO: 7563 - DNA, 21 bp, Homo sapiens
cagatgtagcacgtaattcaa

SEQ ID NO: 7564 - DNA, 21 bp, Homo sapiens
atggatgtactttaccttcta

SEQ ID NO: 7565 - DNA, 21 bp, Homo sapiens
caagcgcagcgtccacttcaa

SEQ ID NO: 7566 - DNA, 21 bp, Homo sapiens
tagctatgacctcaactctaa

SEQ ID NO: 7567 - DNA, 21 bp, Homo sapiens
atgcctttctatgcagaagaa

SEQ ID NO: 7568 - DNA, 21 bp, Homo sapiens
tcggagcattgtgaccactga

SEQ ID NO: 7569 - DNA, 21 bp, Homo sapiens
cacgaggaaatgatcggtaca

SEQ ID NO: 7570 - DNA, 21 bp, Homo sapiens
atggttctcagctacctataa

SEQ ID NO: 7571 - DNA, 21 bp, Homo sapiens
ctggacaggattctagcctaa

SEQ ID NO: 7572 - DNA, 21 bp, Homo sapiens
aaggaggtgatccattggaaa

SEQ ID NO: 7573 - DNA, 21 bp, Homo sapiens
ctacctgagtctgattcttta

SEQ ID NO: 7574 - DNA, 21 bp, Homo sapiens
aaacctttctttacactctaa

SEQ ID NO: 7575 - DNA, 21 bp, Homo sapiens
gaccatcggcttcttctataa

SEQ ID NO: 7576 - DNA, 21 bp, Homo sapiens
cccgcgagtctgtccactata

SEQ ID NO: 7577 - DNA, 21 bp, Homo sapiens
ctgcaatgtgactatccacaa

SEQ ID NO: 7578 - DNA, 21 bp, Homo sapiens
ccggcgggaccgagtgcttta

SEQ ID NO: 7579 - DNA, 21 bp, Homo sapiens
cagcgattggtcaatctctat

SEQ ID NO: 7580 - DNA, 21 bp, Homo sapiens
cagcaccctactgccctttaa

SEQ ID NO: 7581 - DNA, 21 bp, Homo sapiens
ctcgcctatcagactttacta

SEQ ID NO: 7582 - DNA, 21 bp, Homo sapiens
gccagtgaatatatattgcaa

SEQ ID NO: 7583 - DNA, 21 bp, Homo sapiens
taccacgaagtgatgaattta

SEQ ID NO: 7584 - DNA, 21 bp, Homo sapiens
accggtgaatttacagactta

SEQ ID NO: 7585 - DNA, 21 bp, Homo sapiens
cactgacttactacacctcaa

SEQ ID NO: 7586 - DNA, 21 bp, Homo sapiens
cagtgacattacagcaaccta

SEQ ID NO: 7587 - DNA, 21 bp, Homo sapiens
cacaatgggcatggatcagaa

SEQ ID NO: 7588 - DNA, 21 bp, Homo sapiens
actgcagattatgatggtaaa

SEQ ID NO: 7589 - DNA, 21 bp, Homo sapiens
aaccctagggaacatcctcaa

SEQ ID NO: 7590 - DNA, 21 bp, Homo sapiens
agggaacatcctcaagagcaa

SEQ ID NO: 7591 - DNA, 21 bp, Homo sapiens
ccgagcgaggtttaagccgaa

SEQ ID NO: 7592 - DNA, 21 bp, Homo sapiens
tcgagtagtgatacgcatgaa

SEQ ID NO: 7593 - DNA, 21 bp, Homo sapiens
aagtgagttcaagaatcttta

SEQ ID NO: 7594 - DNA, 21 bp, Homo sapiens
ctggtgaacttcttacaatat

SEQ ID NO: 7595 - DNA, 21 bp, Homo sapiens
cactgtttaattggaattgta

SEQ ID NO: 7596 - DNA, 21 bp, Homo sapiens
accacttgccatacttcatta

SEQ ID NO: 7597 - DNA, 21 bp, Homo sapiens
cacctttaggttacctatata

SEQ ID NO: 7598 - DNA, 21 bp, Homo sapiens
cagtggaatgtgaccagtcaa

SEQ ID NO: 7599 - DNA, 21 bp, Homo sapiens
ccggaagtgataacacgcaaa

SEQ ID NO: 7600 - DNA, 21 bp, Homo sapiens
caggtttataacttcgacaca

SEQ ID NO: 7601 - DNA, 21 bp, Homo sapiens
gccgtgtgtacttgtaccaaa

SEQ ID NO: 7602 - DNA, 21 bp, Homo sapiens
tcccagcgtcctgtaatttat

SEQ ID NO: 7603 - DNA, 21 bp, Homo sapiens
aagcaacacaattattcacta

SEQ ID NO: 7604 - DNA, 21 bp, Homo sapiens
aagattcattggtgattccaa

SEQ ID NO: 7605 - DNA, 21 bp, Homo sapiens
taccgtggtatccaccaccaa

SEQ ID NO: 7606 - DNA, 21 bp, Homo sapiens
caggtaagctgtaggcatgta

SEQ ID NO: 7607 - DNA, 21 bp, Homo sapiens
ccgagttactctgaagcaata

SEQ ID NO: 7608 - DNA, 21 bp, Homo sapiens
cagggttgggtcttacacaaa

SEQ ID NO: 7609 - DNA, 21 bp, Homo sapiens
cacggccaagaacctacatta

SEQ ID NO: 7610 - DNA, 21 bp, Homo sapiens
acggccaagaacctacattaa

SEQ ID NO: 7611 - DNA, 21 bp, Homo sapiens
aagggttatcatcttactgca

SEQ ID NO: 7612 - DNA, 21 bp, Homo sapiens
accagcgaaagctgcatttaa

SEQ ID NO: 7613 - DNA, 21 bp, Homo sapiens
tagacggattgaggagctcaa

SEQ ID NO: 7614 - DNA, 21 bp, Homo sapiens
acggccttatgctcctatcaa

SEQ ID NO: 7615 - DNA, 21 bp, Homo sapiens
cagccaagcgtcagaaactaa

SEQ ID NO: 7616 - DNA, 21 bp, Homo sapiens
acgccagttctcagaaataaa

SEQ ID NO: 7617 - DNA, 21 bp, Homo sapiens
cagattcttatgcacgcttga

SEQ ID NO: 7618 - DNA, 21 bp, Homo sapiens
cacgcttgagtccgagactca

SEQ ID NO: 7619 - DNA, 21 bp, Homo sapiens
tacccgatgtatggaaataaa

SEQ ID NO: 7620 - DNA, 21 bp, Homo sapiens
aggagtgtcatttgtccctaa

SEQ ID NO: 7621 - DNA, 21 bp, Homo sapiens
caggatggaatttcacaggaa

SEQ ID NO: 7622 - DNA, 21 bp, Homo sapiens
ctcattattactcaaagtaaa

SEQ ID NO: 7623 - DNA, 21 bp, Homo sapiens
cacgaggtaaagatgatgaaa

SEQ ID NO: 7624 - DNA, 21 bp, Homo sapiens
caggaagaaggaccactttaa

SEQ ID NO: 7625 - DNA, 21 bp, Homo sapiens
ctgctggtccaagaacatgaa

SEQ ID NO: 7626 - DNA, 21 bp, Homo sapiens
ctcaaggatttcctctttcaa

SEQ ID NO: 7627 - DNA, 21 bp, Homo sapiens
aacgctggatatcctggatgt

SEQ ID NO: 7628 - DNA, 21 bp, Homo sapiens
aacaccaactactccctcaag

SEQ ID NO: 7629 - DNA, 21 bp, Homo sapiens
atggattaccattgtactaaa

SEQ ID NO: 7630 - DNA, 21 bp, Homo sapiens
accctggttatacaaattcaa

SEQ ID NO: 7631 - DNA, 21 bp, Homo sapiens
ccgccgtctggtggtcctcaa

SEQ ID NO: 7632 - DNA, 21 bp, Homo sapiens
caggtcttcctagcacgttat

SEQ ID NO: 7633 - DNA, 21 bp, Homo sapiens
cagagctaaatggctccttaa

SEQ ID NO: 7634 - DNA, 21 bp, Homo sapiens
cacagtgagtatgtaacttga

SEQ ID NO: 7635 - DNA, 21 bp, Homo sapiens
tgcctaaatactagtaacata

SEQ ID NO: 7636 - DNA, 21 bp, Homo sapiens
tactagtaacatatcagtgaa

SEQ ID NO: 7637 - DNA, 21 bp, Homo sapiens
tccattgtaaccgaagagtta

SEQ ID NO: 7638 - DNA, 21 bp, Homo sapiens
aaccaggatatttaacaggta

SEQ ID NO: 7639 - DNA, 21 bp, Homo sapiens
aaggatgagatagcagaagta

SEQ ID NO: 7640 - DNA, 21 bp, Homo sapiens
caagttcttgttgggctttaa

SEQ ID NO: 7641 - DNA, 21 bp, Homo sapiens
cagtacgtatttggcattcaa

SEQ ID NO: 7642 - DNA, 21 bp, Homo sapiens
cccagtcaggtttcaagggta

SEQ ID NO: 7643 - DNA, 21 bp, Homo sapiens
caggtttcaagggtagtgaaa

SEQ ID NO: 7644 - DNA, 21 bp, Homo sapiens
acgattcttcagagtatgcaa

SEQ ID NO: 7645 - DNA, 21 bp, Homo sapiens
cccgcccattctactactcaa

SEQ ID NO: 7646 - DNA, 21 bp, Homo sapiens
caaggtatttccagaactaaa

SEQ ID NO: 7647 - DNA, 21 bp, Homo sapiens
cgggttgggacttaactttaa

SEQ ID NO: 7648 - DNA, 21 bp, Homo sapiens
cgggtgaagtttcgtgttgaa

SEQ ID NO: 7649 - DNA, 21 bp, Homo sapiens
cacgtttacctgacatatgaa

SEQ ID NO: 7650 - DNA, 21 bp, Homo sapiens
cacgacaaggtgaatgcacaa

SEQ ID NO: 7651 - DNA, 21 bp, Homo sapiens
ctgcccagtgatgttcaacaa

SEQ ID NO: 7652 - DNA, 21 bp, Homo sapiens
caccttgtttatggcaggttt

SEQ ID NO: 7653 - DNA, 21 bp, Homo sapiens
caggatccatattcatcacaa

SEQ ID NO: 7654 - DNA, 21 bp, Homo sapiens
cacatgtaatccgttaatata

SEQ ID NO: 7655 - DNA, 21 bp, Homo sapiens
aaccgacatgctgggagatta

SEQ ID NO: 7656 - DNA, 21 bp, Homo sapiens
caccatcaaggtgcacatgaa

SEQ ID NO: 7657 - DNA, 21 bp, Homo sapiens
tcggccgcccatcatggttaa

SEQ ID NO: 7658 - DNA, 21 bp, Homo sapiens
gagggtctggcacatccttaa

SEQ ID NO: 7659 - DNA, 21 bp, Homo sapiens
ccgagagtttggacccacata

SEQ ID NO: 7660 - DNA, 21 bp, Homo sapiens
ttgattaatctgattcgccaa

SEQ ID NO: 7661 - DNA, 21 bp, Homo sapiens
ctgagaggacctgatcatgta

SEQ ID NO: 7662 - DNA, 21 bp, Homo sapiens
ccggttcttggccatccgtta

SEQ ID NO: 7663 - DNA, 21 bp, Homo sapiens
caggaagcacaagaacccaaa

SEQ ID NO: 7664 - DNA, 21 bp, Homo sapiens
aacgggctaattcttgctcca

SEQ ID NO: 7665 - DNA, 21 bp, Homo sapiens
caggtgtccacgagtcattaa

SEQ ID NO: 7666 - DNA, 21 bp, Homo sapiens
aacctggcttgcagtaagtaa

SEQ ID NO: 7667 - DNA, 21 bp, Homo sapiens
tccaggaacactataattata

SEQ ID NO: 7668 - DNA, 21 bp, Homo sapiens
aggcgtggccttcgtagccaa

SEQ ID NO: 7669 - DNA, 21 bp, Homo sapiens
caccctgaattccctgctcaa

SEQ ID NO: 7670 - DNA, 21 bp, Homo sapiens
acccacgtttctggagggcaa

SEQ ID NO: 7671 - DNA, 21 bp, Homo sapiens
cagtgtcattgttgatgttaa

SEQ ID NO: 7672 - DNA, 21 bp, Homo sapiens
ccggcaatttctaaaccggga

SEQ ID NO: 7673 - DNA, 21 bp, Homo sapiens
cacccggatgggaaagtgcta

SEQ ID NO: 7674 - DNA, 21 bp, Homo sapiens
tgggaaagtgctacacattta

SEQ ID NO: 7675 - DNA, 21 bp, Homo sapiens
ctgggcagccatcgaacccaa

SEQ ID NO: 7676 - DNA, 21 bp, Homo sapiens
cccaaataaagtcctaatgca

SEQ ID NO: 7677 - DNA, 21 bp, Homo sapiens
ctgcggctttgtccagttcaa

SEQ ID NO: 7678 - DNA, 21 bp, Homo sapiens
cccaattattgtgaacaattt

SEQ ID NO: 7679 - DNA, 21 bp, Homo sapiens
cccagttgacataactgtgaa

SEQ ID NO: 7680 - DNA, 21 bp, Homo sapiens
gcggttaataatgcctgtgaa

SEQ ID NO: 7681 - DNA, 21 bp, Homo sapiens
acccaaattgatcagattaaa

SEQ ID NO: 7682 - DNA, 21 bp, Homo sapiens
caagactatttaatggatgta

SEQ ID NO: 7683 - DNA, 21 bp, Homo sapiens
ttgacacagaattaaaggtta

SEQ ID NO: 7684 - DNA, 21 bp, Homo sapiens
gaggattcacattaatataat

SEQ ID NO: 7685 - DNA, 21 bp, Homo sapiens
ttggaagaacgcagtcgtgaa

SEQ ID NO: 7686 - DNA, 21 bp, Homo sapiens
caccattgatgtacatactca

SEQ ID NO: 7687 - DNA, 21 bp, Homo sapiens
acggctgaaattggaagtgca

SEQ ID NO: 7688 - DNA, 21 bp, Homo sapiens
acggctagaccaggatatcaa

SEQ ID NO: 7689 - DNA, 21 bp, Homo sapiens
caggtcaagcataacaacgaa

SEQ ID NO: 7690 - DNA, 21 bp, Homo sapiens
caggtagatttaatagaccta

SEQ ID NO: 7691 - DNA, 21 bp, Homo sapiens
cccgcccagaaggaacttgta

SEQ ID NO: 7692 - DNA, 21 bp, Homo sapiens
cacatgggagattgtcctgta

SEQ ID NO: 7693 - DNA, 21 bp, Homo sapiens
tcgcattattcttcttgacta

SEQ ID NO: 7694 - DNA, 21 bp, Homo sapiens
cgcattattcttcttgactaa

SEQ ID NO: 7695 - DNA, 21 bp, Homo sapiens
caggagtatgtcatgaatgat

SEQ ID NO: 7696 - DNA, 21 bp, Homo sapiens
ctgcctgaagctgctagacaa

SEQ ID NO: 7697 - DNA, 21 bp, Homo sapiens
ctcccagttcaaggacctcaa

SEQ ID NO: 7698 - DNA, 21 bp, Homo sapiens
cagatccaagctaatatgaga

SEQ ID NO: 7699 - DNA, 21 bp, Homo sapiens
atggctttctttaggatgaaa

SEQ ID NO: 7700 - DNA, 21 bp, Homo sapiens
atgcttgtaaatactatttat

SEQ ID NO: 7701 - DNA, 21 bp, Homo sapiens
ctgattgaaggtgttgatcaa

SEQ ID NO: 7702 - DNA, 21 bp, Homo sapiens
aacgcctaataagaagaacaa

SEQ ID NO: 7703 - DNA, 21 bp, Homo sapiens
tgcgaaattccggatttcctt

SEQ ID NO: 7704 - DNA, 21 bp, Homo sapiens
ttgcatgattctccagtatat

SEQ ID NO: 7705 - DNA, 21 bp, Homo sapiens
caccagaaccacatcattaaa

SEQ ID NO: 7706 - DNA, 21 bp, Homo sapiens
ccggaaggtactcatcttgaa

SEQ ID NO: 7707 - DNA, 21 bp, Homo sapiens
caggaaaggagtagaagtaaa

SEQ ID NO: 7708 - DNA, 21 bp, Homo sapiens
ctggataatttgtactgctaa

SEQ ID NO: 7709 - DNA, 21 bp, Homo sapiens
cccgcgctttatcaagattat

SEQ ID NO: 7710 - DNA, 21 bp, Homo sapiens
cagccttatgtcggcgtcttt

SEQ ID NO: 7711 - DNA, 21 bp, Homo sapiens
ccgggacatcattgccttgaa

SEQ ID NO: 7712 - DNA, 21 bp, Homo sapiens
tagaagctatttaatgattaa

SEQ ID NO: 7713 - DNA, 21 bp, Homo sapiens
ttgggaaacagtacaaacaaa

SEQ ID NO: 7714 - DNA, 21 bp, Homo sapiens
acccttcaaatttgggatata

SEQ ID NO: 7715 - DNA, 21 bp, Homo sapiens
cagggcagaaatagtgaagta

SEQ ID NO: 7716 - DNA, 21 bp, Homo sapiens
cagcgtattgtcagggcagaa

SEQ ID NO: 7717 - DNA, 21 bp, Homo sapiens
cagggcatctgttatcctgaa

SEQ ID NO: 7718 - DNA, 21 bp, Homo sapiens
cagaaggagaacagtcgtgaa

SEQ ID NO: 7719 - DNA, 21 bp, Homo sapiens
caccagaaacgcagcagcaaa

SEQ ID NO: 7720 - DNA, 21 bp, Homo sapiens
agcgaggagctgaattcccaa

SEQ ID NO: 7721 - DNA, 21 bp, Homo sapiens
ctggagggtcatatatacaat

SEQ ID NO: 7722 - DNA, 21 bp, Homo sapiens
catggcttacttgttccataa

SEQ ID NO: 7723 - DNA, 21 bp, Homo sapiens
caggattataaagagatatca

SEQ ID NO: 7724 - DNA, 21 bp, Homo sapiens
accagtgtgcgtgtaacttta

SEQ ID NO: 7725 - DNA, 21 bp, Homo sapiens
cagaaatgcatgggtaaggta

SEQ ID NO: 7726 - DNA, 21 bp, Homo sapiens
ttagggaaatagcttctttaa

SEQ ID NO: 7727 - DNA, 21 bp, Homo sapiens
cagagaattcaccgaatccta

SEQ ID NO: 7728 - DNA, 21 bp, Homo sapiens
aacgctaaggtgggtagccta

SEQ ID NO: 7729 - DNA, 21 bp, Homo sapiens
taggtgttgattctcaaataa

SEQ ID NO: 7730 - DNA, 21 bp, Homo sapiens
aagagtgtgaacacaaattta

SEQ ID NO: 7731 - DNA, 21 bp, Homo sapiens
ccgccgatcgtcaagaggata

SEQ ID NO: 7732 - DNA, 21 bp, Homo sapiens
caggtacatagtaatccaaga

SEQ ID NO: 7733 - DNA, 21 bp, Homo sapiens
cacccacttagctgtgctgta

SEQ ID NO: 7734 - DNA, 21 bp, Homo sapiens
cacagaggtagcaaatggcta

SEQ ID NO: 7735 - DNA, 21 bp, Homo sapiens
cccgtacaacctggccaacaa

SEQ ID NO: 7736 - DNA, 21 bp, Homo sapiens
ccgcgcggcaggaccatggtt

SEQ ID NO: 7737 - DNA, 21 bp, Homo sapiens
atggaagagttagatgcctta

SEQ ID NO: 7738 - DNA, 21 bp, Homo sapiens
cagctcgtgtatactaccaat

SEQ ID NO: 7739 - DNA, 21 bp, Homo sapiens
ctgcttaatagtcttatagaa

SEQ ID NO: 7740 - DNA, 21 bp, Homo sapiens
atgactaggctgataatctta

SEQ ID NO: 7741 - DNA, 21 bp, Homo sapiens
ccggaccatcctgctgctcta

SEQ ID NO: 7742 - DNA, 21 bp, Homo sapiens
ccgcggaagttaagcaaccaa

SEQ ID NO: 7743 - DNA, 21 bp, Homo sapiens
tccgtctgtgtctctcaatta

SEQ ID NO: 7744 - DNA, 21 bp, Homo sapiens
ccgtctgtgtctctcaattaa

SEQ ID NO: 7745 - DNA, 21 bp, Homo sapiens
ctggttgagctcaaatcccaa

SEQ ID NO: 7746 - DNA, 21 bp, Homo sapiens
atcatcataatacaacttcaa

SEQ ID NO: 7747 - DNA, 21 bp, Homo sapiens
cagcatccagctctcagttaa

SEQ ID NO: 7748 - DNA, 21 bp, Homo sapiens
ccggctcaagtacacacatga

SEQ ID NO: 7749 - DNA, 21 bp, Homo sapiens
caggtgctgactgacaagcat

SEQ ID NO: 7750 - DNA, 21 bp, Homo sapiens
ctgcaaagtctggtcaataaa

SEQ ID NO: 7751 - DNA, 21 bp, Homo sapiens
acggattaacagggtcattga

SEQ ID NO: 7752 - DNA, 21 bp, Homo sapiens
accgagctctattaagctgaa

SEQ ID NO: 7753 - DNA, 21 bp, Homo sapiens
ctggcgaagaatatttggtaa

SEQ ID NO: 7754 - DNA, 21 bp, Homo sapiens
ctggtctaatttattaatcta

SEQ ID NO: 7755 - DNA, 21 bp, Homo sapiens
atcgtagtgtgtttaaataaa

SEQ ID NO: 7756 - DNA, 21 bp, Homo sapiens
ccctgtggtgatacctataaa

SEQ ID NO: 7757 - DNA, 21 bp, Homo sapiens
caggctctcaggcacaatcca

SEQ ID NO: 7758 - DNA, 21 bp, Homo sapiens
caggacattactggtgtagaa

SEQ ID NO: 7759 - DNA, 21 bp, Homo sapiens
cacgggcagtctctacgagaa

SEQ ID NO: 7760 - DNA, 21 bp, Homo sapiens
acacactttgtgaataataaa

SEQ ID NO: 7761 - DNA, 21 bp, Homo sapiens
tcggttcatcctggacccgaa

SEQ ID NO: 7762 - DNA, 21 bp, Homo sapiens
ctggatctggtggtaacagaa

SEQ ID NO: 7763 - DNA, 21 bp, Homo sapiens
atggttgtatattcctaataa

SEQ ID NO: 7764 - DNA, 21 bp, Homo sapiens
aagcatgttcttactgctcaa

SEQ ID NO: 7765 - DNA, 21 bp, Homo sapiens
tcagttcgtaatggacctgaa

SEQ ID NO: 7766 - DNA, 21 bp, Homo sapiens
gtccaaattcctagtgattta

SEQ ID NO: 7767 - DNA, 21 bp, Homo sapiens
caggtacatgcagttcagcaa

SEQ ID NO: 7768 - DNA, 21 bp, Homo sapiens
cagcctactctaaattattga

SEQ ID NO: 7769 - DNA, 21 bp, Homo sapiens
ttggaaagtcagggcatcgaa

SEQ ID NO: 7770 - DNA, 21 bp, Homo sapiens
tagcatcatatattagttcat

SEQ ID NO: 7771 - DNA, 21 bp, Homo sapiens
atcaaggaatatacggatgaa

SEQ ID NO: 7772 - DNA, 21 bp, Homo sapiens
aggcagtaatttcgctgtata

SEQ ID NO: 7773 - DNA, 21 bp, Homo sapiens
gccctgcttactagtgagaaa

SEQ ID NO: 7774 - DNA, 21 bp, Homo sapiens
caggcatgaagtcatcaatat

SEQ ID NO: 7775 - DNA, 21 bp, Homo sapiens
caggagtcagcaataaagcta

SEQ ID NO: 7776 - DNA, 21 bp, Homo sapiens
cagcaataaagctatgtctga

SEQ ID NO: 7777 - DNA, 21 bp, Homo sapiens
tcggagctgcaccgagggcaa

SEQ ID NO: 7778 - DNA, 21 bp, Homo sapiens
caggactttagttagaattaa

SEQ ID NO: 7779 - DNA, 21 bp, Homo sapiens
aggcaagatcctacccggaaa

SEQ ID NO: 7780 - DNA, 21 bp, Homo sapiens
aaccattaatgtttaatttaa

SEQ ID NO: 7781 - DNA, 21 bp, Homo sapiens
agggatgattatgctaatcta

SEQ ID NO: 7782 - DNA, 21 bp, Homo sapiens
tacactcgtaatacccttaaa

SEQ ID NO: 7783 - DNA, 21 bp, Homo sapiens
cggagccaaggtgatcataaa

SEQ ID NO: 7784 - DNA, 21 bp, Homo sapiens
cagcacaatcacaccgaatat

SEQ ID NO: 7785 - DNA, 21 bp, Homo sapiens
cagaactaggtctaccttcaa

SEQ ID NO: 7786 - DNA, 21 bp, Homo sapiens
accgaatatgaccttcaccaa

SEQ ID NO: 7787 - DNA, 21 bp, Homo sapiens
aagagccatgatctaattcaa

SEQ ID NO: 7788 - DNA, 21 bp, Homo sapiens
caccataatactcctctgaaa

SEQ ID NO: 7789 - DNA, 21 bp, Homo sapiens
caggttgacttaatttattta

SEQ ID NO: 7790 - DNA, 21 bp, Homo sapiens
cagctgtatattctagtccaa

SEQ ID NO: 7791 - DNA, 21 bp, Homo sapiens
ctgcggatgattgcaagtcaa

SEQ ID NO: 7792 - DNA, 21 bp, Homo sapiens
ccgggagacttgcaatctgaa

SEQ ID NO: 7793 - DNA, 21 bp, Homo sapiens
cacgtttgtcactgccgttta

SEQ ID NO: 7794 - DNA, 21 bp, Homo sapiens
aagcatgtggatgtacatcta

SEQ ID NO: 7795 - DNA, 21 bp, Homo sapiens
atgcagtttattgtaatatat

SEQ ID NO: 7796 - DNA, 21 bp, Homo sapiens
ccggctcaccgtgcactttaa

SEQ ID NO: 7797 - DNA, 21 bp, Homo sapiens
tggcatcagcttacagtgcaa

SEQ ID NO: 7798 - DNA, 21 bp, Homo sapiens
ctggaggagtttgaggatgaa

SEQ ID NO: 7799 - DNA, 21 bp, Homo sapiens
cagaataaactctgggttaaa

SEQ ID NO: 7800 - DNA, 21 bp, Homo sapiens
cacctttgccgtcatgcgaaa

SEQ ID NO: 7801 - DNA, 21 bp, Homo sapiens
cagaagttgaagtgaaatcta

SEQ ID NO: 7802 - DNA, 21 bp, Homo sapiens
aaggctgaagattatgaagaa

SEQ ID NO: 7803 - DNA, 21 bp, Homo sapiens
tgggaccagtacaattctcaa

SEQ ID NO: 7804 - DNA, 21 bp, Homo sapiens
aagcatcatcatcagaatgaa

SEQ ID NO: 7805 - DNA, 21 bp, Homo sapiens
agccgtcattattaacaggaa

SEQ ID NO: 7806 - DNA, 21 bp, Homo sapiens
gacggctatcttaaagtttat

SEQ ID NO: 7807 - DNA, 21 bp, Homo sapiens
caggaagcttgggtaccttaa

SEQ ID NO: 7808 - DNA, 21 bp, Homo sapiens
ccgctctagcctgacatataa

SEQ ID NO: 7809 - DNA, 21 bp, Homo sapiens
aacaatgtgatacgtaaatta

SEQ ID NO: 7810 - DNA, 21 bp, Homo sapiens
taggcaaattccagatagtaa

SEQ ID NO: 7811 - DNA, 21 bp, Homo sapiens
gacaggcaagttcatcttaaa

SEQ ID NO: 7812 - DNA, 21 bp, Homo sapiens
ccgggtctcactgacgtacaa

SEQ ID NO: 7813 - DNA, 21 bp, Homo sapiens
ccgccggaggctggaccacaa

SEQ ID NO: 7814 - DNA, 21 bp, Homo sapiens
caggcgaatgggagccatgta

SEQ ID NO: 7815 - DNA, 21 bp, Homo sapiens
cggcagtggtctaaagcatta

SEQ ID NO: 7816 - DNA, 21 bp, Homo sapiens
taggatagttagtgaggatta

SEQ ID NO: 7817 - DNA, 21 bp, Homo sapiens
ctgagcagtgatatagcataa

SEQ ID NO: 7818 - DNA, 21 bp, Homo sapiens
cagcaacgtgaaataacgcaa

SEQ ID NO: 7819 - DNA, 21 bp, Homo sapiens
caaggtcgtaaatgcatgcta

SEQ ID NO: 7820 - DNA, 21 bp, Homo sapiens
ctgggcctgaacataatttca

SEQ ID NO: 7821 - DNA, 21 bp, Homo sapiens
tgccaatgtagtctcacttaa

SEQ ID NO: 7822 - DNA, 21 bp, Homo sapiens
gccaatgtagtctcacttaaa

SEQ ID NO: 7823 - DNA, 21 bp, Homo sapiens
cagaccaatgggtgaagttaa

SEQ ID NO: 7824 - DNA, 21 bp, Homo sapiens
catggtgatggcactacttta

SEQ ID NO: 7825 - DNA, 21 bp, Homo sapiens
gagggatttgcagttgataaa

SEQ ID NO: 7826 - DNA, 21 bp, Homo sapiens
ctgggaatggttaaacacaaa

SEQ ID NO: 7827 - DNA, 21 bp, Homo sapiens
aacactgttgttaacatctaa

SEQ ID NO: 7828 - DNA, 21 bp, Homo sapiens
caccacatttcttatattaaa

SEQ ID NO: 7829 - DNA, 21 bp, Homo sapiens
gtggatggcctattacatcaa

SEQ ID NO: 7830 - DNA, 21 bp, Homo sapiens
ctggatcggtttcgccatcat

SEQ ID NO: 7831 - DNA, 21 bp, Homo sapiens
ttgtcttataatactagctaa

SEQ ID NO: 7832 - DNA, 21 bp, Homo sapiens
agggaaactatttatatgtaa

SEQ ID NO: 7833 - DNA, 21 bp, Homo sapiens
ccgagacattcgcatcaaata

SEQ ID NO: 7834 - DNA, 21 bp, Homo sapiens
acccgtggtggtggagggcaa

SEQ ID NO: 7835 - DNA, 21 bp, Homo sapiens
taggacattctcaaatttcaa

SEQ ID NO: 7836 - DNA, 21 bp, Homo sapiens
ccacaatttgctaacatttaa

SEQ ID NO: 7837 - DNA, 21 bp, Homo sapiens
ctggctgtggccaatgatgaa

SEQ ID NO: 7838 - DNA, 21 bp, Homo sapiens
aaggctttggtttccagttta

SEQ ID NO: 7839 - DNA, 21 bp, Homo sapiens
ctgcataatgttgattataaa

SEQ ID NO: 7840 - DNA, 21 bp, Homo sapiens
caccaaggaattagaattgaa

SEQ ID NO: 7841 - DNA, 21 bp, Homo sapiens
atgaaattcttcctacttata

SEQ ID NO: 7842 - DNA, 21 bp, Homo sapiens
aagtcggaaagtacaatgaaa

SEQ ID NO: 7843 - DNA, 21 bp, Homo sapiens
ccgagtgcagatgttattaaa

SEQ ID NO: 7844 - DNA, 21 bp, Homo sapiens
cacggtcaaacagatccgcaa

SEQ ID NO: 7845 - DNA, 21 bp, Homo sapiens
ttgggagtgattgtggtctaa

SEQ ID NO: 7846 - DNA, 21 bp, Homo sapiens
caggacaagtactttatgata

SEQ ID NO: 7847 - DNA, 21 bp, Homo sapiens
cagcattcccacagcctgcaa

SEQ ID NO: 7848 - DNA, 21 bp, Homo sapiens
aacgaaatccaagcaagcata

SEQ ID NO: 7849 - DNA, 21 bp, Homo sapiens
aaggagccatctacctatgaa

SEQ ID NO: 7850 - DNA, 21 bp, Homo sapiens
gacacgcatgatagaagcaaa

SEQ ID NO: 7851 - DNA, 21 bp, Homo sapiens
atcggcaacaagaagaactaa

SEQ ID NO: 7852 - DNA, 21 bp, Homo sapiens
atccagcaacttgcacctata

SEQ ID NO: 7853 - DNA, 21 bp, Homo sapiens
aaggaactctatggaagccaa

SEQ ID NO: 7854 - DNA, 21 bp, Homo sapiens
caccatcaagtcagaggagaa

SEQ ID NO: 7855 - DNA, 21 bp, Homo sapiens
tagctttaaatacatcattaa

SEQ ID NO: 7856 - DNA, 21 bp, Homo sapiens
cagcaataaacttacaagtaa

SEQ ID NO: 7857 - DNA, 21 bp, Homo sapiens
aaggttcgattgagtgaaaca

SEQ ID NO: 7858 - DNA, 21 bp, Homo sapiens
gggcaagtacacagatcttaa

SEQ ID NO: 7859 - DNA, 21 bp, Homo sapiens
cagactaaagacaaactggaa

SEQ ID NO: 7860 - DNA, 21 bp, Homo sapiens
atgcaagagtgtactactcaa

SEQ ID NO: 7861 - DNA, 21 bp, Homo sapiens
cagctgtgtggtcaaacagta

SEQ ID NO: 7862 - DNA, 21 bp, Homo sapiens
ctaccacaagactaacataaa

SEQ ID NO: 7863 - DNA, 21 bp, Homo sapiens
ctgggtgtatctcagagataa

SEQ ID NO: 7864 - DNA, 21 bp, Homo sapiens
cgccgtgtatactccgatgaa

SEQ ID NO: 7865 - DNA, 21 bp, Homo sapiens
aagacagtacaaagcatataa

SEQ ID NO: 7866 - DNA, 21 bp, Homo sapiens
gtggccattcttgtagttata

SEQ ID NO: 7867 - DNA, 21 bp, Homo sapiens
cagctcagcgattgccaaata

SEQ ID NO: 7868 - DNA, 21 bp, Homo sapiens
aggcactgtggtgatcccata

SEQ ID NO: 7869 - DNA, 21 bp, Homo sapiens
cccggtggtttcctagaaaca

SEQ ID NO: 7870 - DNA, 21 bp, Homo sapiens
cccgctcaccagggagtataa

SEQ ID NO: 7871 - DNA, 21 bp, Homo sapiens
aggcaattcagtggactataa

SEQ ID NO: 7872 - DNA, 21 bp, Homo sapiens
accgcagtattgtccaaatta

SEQ ID NO: 7873 - DNA, 21 bp, Homo sapiens
caccatgatggagctggacta

SEQ ID NO: 7874 - DNA, 21 bp, Homo sapiens
tggcgtttcctaagtacgaaa

SEQ ID NO: 7875 - DNA, 21 bp, Homo sapiens
cgggatcctggatgtgatcaa

SEQ ID NO: 7876 - DNA, 21 bp, Homo sapiens
cgccaacagtgtgattaccta

SEQ ID NO: 7877 - DNA, 21 bp, Homo sapiens
ccggttccgctgagatcagaa

SEQ ID NO: 7878 - DNA, 21 bp, Homo sapiens
ctgactcagctagacccgtaa

SEQ ID NO: 7879 - DNA, 21 bp, Homo sapiens
tccgctgagatcagaaggcaa

SEQ ID NO: 7880 - DNA, 21 bp, Homo sapiens
ctccaacgtgtcagccaacaa

SEQ ID NO: 7881 - DNA, 21 bp, Homo sapiens
cagagtactttcggttctgaa

SEQ ID NO: 7882 - DNA, 21 bp, Homo sapiens
cccagcgaagaaatggataaa

SEQ ID NO: 7883 - DNA, 21 bp, Homo sapiens
gagagctacattataagaata

SEQ ID NO: 7884 - DNA, 21 bp, Homo sapiens
taggcccgaaatgactagcaa

SEQ ID NO: 7885 - DNA, 21 bp, Homo sapiens
caggatcaagggccggaaata

SEQ ID NO: 7886 - DNA, 21 bp, Homo sapiens
ccggaaataaaggctgttgta

SEQ ID NO: 7887 - DNA, 21 bp, Homo sapiens
aagcaccgtgttcatgaatct

SEQ ID NO: 7888 - DNA, 21 bp, Homo sapiens
aatgcgacgaacctctgagca

SEQ ID NO: 7889 - DNA, 21 bp, Homo sapiens
cacagataaactcatcctgaa

SEQ ID NO: 7890 - DNA, 21 bp, Homo sapiens
atggaggacctcgtaaatgaa

SEQ ID NO: 7891 - DNA, 21 bp, Homo sapiens
tcagactatatttcaaataaa

SEQ ID NO: 7892 - DNA, 21 bp, Homo sapiens
cccactaaagagagttctaaa

SEQ ID NO: 7893 - DNA, 21 bp, Homo sapiens
acgggaagacttagagtttaa

SEQ ID NO: 7894 - DNA, 21 bp, Homo sapiens
atggataatttccataagaaa

SEQ ID NO: 7895 - DNA, 21 bp, Homo sapiens
agggtgatgtgtgtataatta

SEQ ID NO: 7896 - DNA, 21 bp, Homo sapiens
cccgtggtgggcacagttcta

SEQ ID NO: 7897 - DNA, 21 bp, Homo sapiens
caccatggaggacaaacgcaa

SEQ ID NO: 7898 - DNA, 21 bp, Homo sapiens
ccggaagtttgtagctgacta

SEQ ID NO: 7899 - DNA, 21 bp, Homo sapiens
accctgtgaatcataatttaa

SEQ ID NO: 7900 - DNA, 21 bp, Homo sapiens
ccgagtgatcttctcttctaa

SEQ ID NO: 7901 - DNA, 21 bp, Homo sapiens
atggcgagacctggacaggaa

SEQ ID NO: 7902 - DNA, 21 bp, Homo sapiens
gacaagaaggtcggtgttaaa

SEQ ID NO: 7903 - DNA, 21 bp, Homo sapiens
cgggagatgcttccttctgta

SEQ ID NO: 7904 - DNA, 21 bp, Homo sapiens
tacttgtactgtgtaaataaa

SEQ ID NO: 7905 - DNA, 21 bp, Homo sapiens
tcgaagtttcctgaacattaa

SEQ ID NO: 7906 - DNA, 21 bp, Homo sapiens
agggatgagaaagatagtcaa

SEQ ID NO: 7907 - DNA, 21 bp, Homo sapiens
cagcctgagatacgtgcctta

SEQ ID NO: 7908 - DNA, 21 bp, Homo sapiens
taggataatcggtacagttat

SEQ ID NO: 7909 - DNA, 21 bp, Homo sapiens
atcggtacagttattcttaaa

SEQ ID NO: 7910 - DNA, 21 bp, Homo sapiens
accgggaagttatcagatcaa

SEQ ID NO: 7911 - DNA, 21 bp, Homo sapiens
acgattggaattagaattaaa

SEQ ID NO: 7912 - DNA, 21 bp, Homo sapiens
caggatggatttagccgacta

SEQ ID NO: 7913 - DNA, 21 bp, Homo sapiens
acggtccaccctgagaatgaa

SEQ ID NO: 7914 - DNA, 21 bp, Homo sapiens
caggcggaagttcctcatcta

SEQ ID NO: 7915 - DNA, 21 bp, Homo sapiens
ccaggagttcttctcggctaa

SEQ ID NO: 7916 - DNA, 21 bp, Homo sapiens
caccctcaatgagactgtgaa

SEQ ID NO: 7917 - DNA, 21 bp, Homo sapiens
tagtcttgtagtatgtttgaa

SEQ ID NO: 7918 - DNA, 21 bp, Homo sapiens
tagcgttacaatagaatagta

SEQ ID NO: 7919 - DNA, 21 bp, Homo sapiens
acggtatgagtttaaagccaa

SEQ ID NO: 7920 - DNA, 21 bp, Homo sapiens
cagcaatatcttcaggtgtaa

SEQ ID NO: 7921 - DNA, 21 bp, Homo sapiens
aacaatttatttaagtttaaa

SEQ ID NO: 7922 - DNA, 21 bp, Homo sapiens
cgggagctagaagacaatgaa

SEQ ID NO: 7923 - DNA, 21 bp, Homo sapiens
cacatgaaatatatatatata

SEQ ID NO: 7924 - DNA, 21 bp, Homo sapiens
cccgtccatcctggaggtcaa

SEQ ID NO: 7925 - DNA, 21 bp, Homo sapiens
aaggatgagaatattcaacaa

SEQ ID NO: 7926 - DNA, 21 bp, Homo sapiens
ccacataagtttataatttaa

SEQ ID NO: 7927 - DNA, 21 bp, Homo sapiens
cagagtgaactcaacaaccaa

SEQ ID NO: 7928 - DNA, 21 bp, Homo sapiens
cagggtgttactcctcaccaa

SEQ ID NO: 7929 - DNA, 21 bp, Homo sapiens
cagcagctggagaaatataaa

SEQ ID NO: 7930 - DNA, 21 bp, Homo sapiens
atggagttgatcatcaagtaa

SEQ ID NO: 7931 - DNA, 21 bp, Homo sapiens
cagcacattaaagctcacgaa

SEQ ID NO: 7932 - DNA, 21 bp, Homo sapiens
caggcagtatatccagttaga

SEQ ID NO: 7933 - DNA, 21 bp, Homo sapiens
tgctcttaatttcgaaattaa

SEQ ID NO: 7934 - DNA, 21 bp, Homo sapiens
tcccgtggatctagaatatca

SEQ ID NO: 7935 - DNA, 21 bp, Homo sapiens
tgggtctatagatgtaattaa

SEQ ID NO: 7936 - DNA, 21 bp, Homo sapiens
gggtctatagatgtaattaaa

SEQ ID NO: 7937 - DNA, 21 bp, Homo sapiens
ctagcagtaaatccagaccaa

SEQ ID NO: 7938 - DNA, 21 bp, Homo sapiens
acgccctaagagtaaggccaa

SEQ ID NO: 7939 - DNA, 21 bp, Homo sapiens
caccgtgagcctgaaccacaa

SEQ ID NO: 7940 - DNA, 21 bp, Homo sapiens
acgggccagcaacgcatttaa

SEQ ID NO: 7941 - DNA, 21 bp, Homo sapiens
cccagtcaagttcctctggaa

SEQ ID NO: 7942 - DNA, 21 bp, Homo sapiens
caggtgaagcccacctgtaaa

SEQ ID NO: 7943 - DNA, 21 bp, Homo sapiens
gaccattaactgagtcccaaa

SEQ ID NO: 7944 - DNA, 21 bp, Homo sapiens
tcgaatggccatgtttaagaa

SEQ ID NO: 7945 - DNA, 21 bp, Homo sapiens
tagcatcttgtgatcacccaa

SEQ ID NO: 7946 - DNA, 21 bp, Homo sapiens
ccagatcaggaccgtgataaa

SEQ ID NO: 7947 - DNA, 21 bp, Homo sapiens
cacgatgttcatccaggccaa

SEQ ID NO: 7948 - DNA, 21 bp, Homo sapiens
atgagggttcctaaaccttaa

SEQ ID NO: 7949 - DNA, 21 bp, Homo sapiens
aaagatataattaacgatcaa

SEQ ID NO: 7950 - DNA, 21 bp, Homo sapiens
caggattgtgctggcagccaa

SEQ ID NO: 7951 - DNA, 21 bp, Homo sapiens
tcggtgggccttagtctgcaa

SEQ ID NO: 7952 - DNA, 21 bp, Homo sapiens
cacgctagctgtggactttat

SEQ ID NO: 7953 - DNA, 21 bp, Homo sapiens
caccaataggtgggtgaagaa

SEQ ID NO: 7954 - DNA, 21 bp, Homo sapiens
accatgattatcagacactaa

SEQ ID NO: 7955 - DNA, 21 bp, Homo sapiens
ccggaagggtgtggccattaa

SEQ ID NO: 7956 - DNA, 21 bp, Homo sapiens
cccataaactctatacttcta

SEQ ID NO: 7957 - DNA, 21 bp, Homo sapiens
ccgcatcttggtgaaacgtga

SEQ ID NO: 7958 - DNA, 21 bp, Homo sapiens
aaagagcagatttacgatgta

SEQ ID NO: 7959 - DNA, 21 bp, Homo sapiens
ctgcgtcatcatcgtgtgtaa

SEQ ID NO: 7960 - DNA, 21 bp, Homo sapiens
cagccttgtatgcaccgtcaa

SEQ ID NO: 7961 - DNA, 21 bp, Homo sapiens
tgcgatgaccacaacaaggta

SEQ ID NO: 7962 - DNA, 21 bp, Homo sapiens
aaggattagaaaccgcaatta

SEQ ID NO: 7963 - DNA, 21 bp, Homo sapiens
gtggagaaagtgtattcttta

SEQ ID NO: 7964 - DNA, 21 bp, Homo sapiens
caggaataactgtccaaatta

SEQ ID NO: 7965 - DNA, 21 bp, Homo sapiens
ctccagtatcctgacatgtaa

SEQ ID NO: 7966 - DNA, 21 bp, Homo sapiens
cagggaagaatcatctccaaa

SEQ ID NO: 7967 - DNA, 21 bp, Homo sapiens
acggaagttgcaagagtttga

SEQ ID NO: 7968 - DNA, 21 bp, Homo sapiens
ctccgcctacgtggcctataa

SEQ ID NO: 7969 - DNA, 21 bp, Homo sapiens
cagcgagactttcaacagttt

SEQ ID NO: 7970 - DNA, 21 bp, Homo sapiens
ctggccctcgatgccaaatta

SEQ ID NO: 7971 - DNA, 21 bp, Homo sapiens
acagttctaaagggctttata

SEQ ID NO: 7972 - DNA, 21 bp, Homo sapiens
cagccatgtgtggatcttgaa

SEQ ID NO: 7973 - DNA, 21 bp, Homo sapiens
cacatgcataaaggaaatcaa

SEQ ID NO: 7974 - DNA, 21 bp, Homo sapiens
cacgtttgtgtgtccttgtaa

SEQ ID NO: 7975 - DNA, 21 bp, Homo sapiens
cagcttaactctggctactat

SEQ ID NO: 7976 - DNA, 21 bp, Homo sapiens
cacgctggcccaggtacgcaa

SEQ ID NO: 7977 - DNA, 21 bp, Homo sapiens
gcgcatcgagtttgagcagaa

SEQ ID NO: 7978 - DNA, 21 bp, Homo sapiens
aagcggaagcttcgagaagta

SEQ ID NO: 7979 - DNA, 21 bp, Homo sapiens
cccggattagtgggagatcaa

SEQ ID NO: 7980 - DNA, 21 bp, Homo sapiens
cagaacgagactggcaaatta

SEQ ID NO: 7981 - DNA, 21 bp, Homo sapiens
cccgttgattatgcaaggcaa

SEQ ID NO: 7982 - DNA, 21 bp, Homo sapiens
cagcgttgagagtcaagacaa

SEQ ID NO: 7983 - DNA, 21 bp, Homo sapiens
ctgcctatggctgaaactata

SEQ ID NO: 7984 - DNA, 21 bp, Homo sapiens
aagcatcgtgcaataagtgaa

SEQ ID NO: 7985 - DNA, 21 bp, Homo sapiens
aaggtacaagaagatattaaa

SEQ ID NO: 7986 - DNA, 21 bp, Homo sapiens
aagcaaataattcacatataa

SEQ ID NO: 7987 - DNA, 21 bp, Homo sapiens
caggattgcatttaatagata

SEQ ID NO: 7988 - DNA, 21 bp, Homo sapiens
ctggcatatttctaacactaa

SEQ ID NO: 7989 - DNA, 21 bp, Homo sapiens
cacaatgttaagggatttata

SEQ ID NO: 7990 - DNA, 21 bp, Homo sapiens
cccagttcaatggatactaaa

SEQ ID NO: 7991 - DNA, 21 bp, Homo sapiens
cacttgtatctccttagttaa

SEQ ID NO: 7992 - DNA, 21 bp, Homo sapiens
aagcgattcaatcctgatcaa

SEQ ID NO: 7993 - DNA, 21 bp, Homo sapiens
ctggaggatcagcaaggataa

SEQ ID NO: 7994 - DNA, 21 bp, Homo sapiens
cacaacgactctcgaccggaa

SEQ ID NO: 7995 - DNA, 21 bp, Homo sapiens
caccgagaagctcaaggctaa

SEQ ID NO: 7996 - DNA, 21 bp, Homo sapiens
gcgcctcaccttagcattcaa

SEQ ID NO: 7997 - DNA, 21 bp, Homo sapiens
caggtgcctatcactgagtaa

SEQ ID NO: 7998 - DNA, 21 bp, Homo sapiens
aagcagagctgcgtaaagtta

SEQ ID NO: 7999 - DNA, 21 bp, Homo sapiens
ctgcatttaatgaaacatgta

SEQ ID NO: 8000 - DNA, 21 bp, Homo sapiens
cacctgcttgaaagaaattaa

SEQ ID NO: 8001 - DNA, 21 bp, Homo sapiens
cacctcgatgatgattgcgta

SEQ ID NO: 8002 - DNA, 21 bp, Homo sapiens
aagactaaagcttcactataa

SEQ ID NO: 8003 - DNA, 21 bp, Homo sapiens
ctggatcatgcaagattacaa

SEQ ID NO: 8004 - DNA, 21 bp, Homo sapiens
cgggttgtcttccgtcagata

SEQ ID NO: 8005 - DNA, 21 bp, Homo sapiens
cagcatggtgactatagttaa

SEQ ID NO: 8006 - DNA, 21 bp, Homo sapiens
caggaacagttctgaagtcaa

SEQ ID NO: 8007 - DNA, 21 bp, Homo sapiens
tagatttataagtgtcaataa

SEQ ID NO: 8008 - DNA, 21 bp, Homo sapiens
atggccattaatgttacacaa

SEQ ID NO: 8009 - DNA, 21 bp, Homo sapiens
acccactaaagtagacaataa

SEQ ID NO: 8010 - DNA, 21 bp, Homo sapiens
cagaggcatttcctcgcgtaa

SEQ ID NO: 8011 - DNA, 21 bp, Homo sapiens
acaattgatgttgaacttgta

SEQ ID NO: 8012 - DNA, 21 bp, Homo sapiens
ttgggagaattgacatcttaa

SEQ ID NO: 8013 - DNA, 21 bp, Homo sapiens
cccattcatatttcaacagaa

SEQ ID NO: 8014 - DNA, 21 bp, Homo sapiens
caggcagcctctggaactcaa

SEQ ID NO: 8015 - DNA, 21 bp, Homo sapiens
cagaccagacgtttcattcta

SEQ ID NO: 8016 - DNA, 21 bp, Homo sapiens
cactaaggacacaagaatcaa

SEQ ID NO: 8017 - DNA, 21 bp, Homo sapiens
caccaattctgaagacaacta

SEQ ID NO: 8018 - DNA, 21 bp, Homo sapiens
aacctcaaacctgatcggaaa

SEQ ID NO: 8019 - DNA, 21 bp, Homo sapiens
ccgaaactgcagaaccttcta

SEQ ID NO: 8020 - DNA, 21 bp, Homo sapiens
caccatcgtcatggtcctcaa

SEQ ID NO: 8021 - DNA, 21 bp, Homo sapiens
cagagaaaggaagaaacttaa

SEQ ID NO: 8022 - DNA, 21 bp, Homo sapiens
ctggctcagtttggtgatgaa

SEQ ID NO: 8023 - DNA, 21 bp, Homo sapiens
atgtatttatttatttattta

SEQ ID NO: 8024 - DNA, 21 bp, Homo sapiens
cccgatcaagacctaggacaa

SEQ ID NO: 8025 - DNA, 21 bp, Homo sapiens
taaagtcaaattggagtttaa

SEQ ID NO: 8026 - DNA, 21 bp, Homo sapiens
cacaattgaggaactgatcaa

SEQ ID NO: 8027 - DNA, 21 bp, Homo sapiens
caggaacatgcgccagttaaa

SEQ ID NO: 8028 - DNA, 21 bp, Homo sapiens
caggtttggacacaactacaa

SEQ ID NO: 8029 - DNA, 21 bp, Homo sapiens
agggatgtcattgtaaatata

SEQ ID NO: 8030 - DNA, 21 bp, Homo sapiens
ctggaatatactagtatctta

SEQ ID NO: 8031 - DNA, 21 bp, Homo sapiens
aacccattcatcgtaaacaaa

SEQ ID NO: 8032 - DNA, 21 bp, Homo sapiens
cagacctaaactgatcctaaa

SEQ ID NO: 8033 - DNA, 21 bp, Homo sapiens
ttggatgtcatccaaacttta

SEQ ID NO: 8034 - DNA, 21 bp, Homo sapiens
acgcagtgactacgcaaccta

SEQ ID NO: 8035 - DNA, 21 bp, Homo sapiens
cagctgcttaattaattgaaa

SEQ ID NO: 8036 - DNA, 21 bp, Homo sapiens
aaggtacaattgtaccataaa

SEQ ID NO: 8037 - DNA, 21 bp, Homo sapiens
aagattgatagtgaaattaaa

SEQ ID NO: 8038 - DNA, 21 bp, Homo sapiens
cagctaatgattacagtttaa

SEQ ID NO: 8039 - DNA, 21 bp, Homo sapiens
aagcttaacatcagaatgaaa

SEQ ID NO: 8040 - DNA, 21 bp, Homo sapiens
ctgggtggtctgtgtacttaa

SEQ ID NO: 8041 - DNA, 21 bp, Homo sapiens
aaggagttgtttacagatgaa

SEQ ID NO: 8042 - DNA, 21 bp, Homo sapiens
cacattgttaaggacatataa

SEQ ID NO: 8043 - DNA, 21 bp, Homo sapiens
ccagtttgtgatgacccagaa

SEQ ID NO: 8044 - DNA, 21 bp, Homo sapiens
ccgggagacgctgctgggcaa

SEQ ID NO: 8045 - DNA, 21 bp, Homo sapiens
gagggtgatgttgcaaatgaa

SEQ ID NO: 8046 - DNA, 21 bp, Homo sapiens
aagaaattccacaaatatgaa

SEQ ID NO: 8047 - DNA, 21 bp, Homo sapiens
ctggttgatttgagagataaa

SEQ ID NO: 8048 - DNA, 21 bp, Homo sapiens
aagatggatcttgtaaattta

SEQ ID NO: 8049 - DNA, 21 bp, Homo sapiens
aaccagcaagttgttcattta

SEQ ID NO: 8050 - DNA, 21 bp, Homo sapiens
aacctagttagtagtcttcaa

SEQ ID NO: 8051 - DNA, 21 bp, Homo sapiens
accagcgtgtgtacacataaa

SEQ ID NO: 8052 - DNA, 21 bp, Homo sapiens
cagccaagagtcgaagctaaa

SEQ ID NO: 8053 - DNA, 21 bp, Homo sapiens
ttcagtgaatgtcatactaaa

SEQ ID NO: 8054 - DNA, 21 bp, Homo sapiens
ccgagtggctcctgaatttaa

SEQ ID NO: 8055 - DNA, 21 bp, Homo sapiens
acggacctcttggtggatgaa

SEQ ID NO: 8056 - DNA, 21 bp, Homo sapiens
caggctgaagagacacctaaa

SEQ ID NO: 8057 - DNA, 21 bp, Homo sapiens
atggacttaagtgatattaaa

SEQ ID NO: 8058 - DNA, 21 bp, Homo sapiens
ccgagagttggcgtgaaggaa

SEQ ID NO: 8059 - DNA, 21 bp, Homo sapiens
cagaataaccaccatgaggaa

SEQ ID NO: 8060 - DNA, 21 bp, Homo sapiens
tagctttagccgagaaagaaa

SEQ ID NO: 8061 - DNA, 21 bp, Homo sapiens
ccggaacagctctaggaataa

SEQ ID NO: 8062 - DNA, 21 bp, Homo sapiens
gtggacagtttaagtacttaa

SEQ ID NO: 8063 - DNA, 21 bp, Homo sapiens
tccaagcgttataatcgcaaa

SEQ ID NO: 8064 - DNA, 21 bp, Homo sapiens
ccgggtagttctggaggagaa

SEQ ID NO: 8065 - DNA, 21 bp, Homo sapiens
ttcgatgaagaaaccacggaa

SEQ ID NO: 8066 - DNA, 21 bp, Homo sapiens
caggattgagatagaggagaa

SEQ ID NO: 8067 - DNA, 21 bp, Homo sapiens
cagaattatgtgcataccaat

SEQ ID NO: 8068 - DNA, 21 bp, Homo sapiens
atggcgtattatgtgaactaa

SEQ ID NO: 8069 - DNA, 21 bp, Homo sapiens
gaggctatttaagtaaattta

SEQ ID NO: 8070 - DNA, 21 bp, Homo sapiens
tagctagtaataacaatataa

SEQ ID NO: 8071 - DNA, 21 bp, Homo sapiens
acagcctgacatggaatttaa

SEQ ID NO: 8072 - DNA, 21 bp, Homo sapiens
caggttctgcattatgcccaa

SEQ ID NO: 8073 - DNA, 21 bp, Homo sapiens
ctcgggcaagatggctatcaa

SEQ ID NO: 8074 - DNA, 21 bp, Homo sapiens
cagaggcaaggtgttacacta

SEQ ID NO: 8075 - DNA, 21 bp, Homo sapiens
aagaagctagaagaactcaaa

SEQ ID NO: 8076 - DNA, 21 bp, Homo sapiens
aacagtggaatcctaaattta

SEQ ID NO: 8077 - DNA, 21 bp, Homo sapiens
cccactgtttgtaacatggaa

SEQ ID NO: 8078 - DNA, 21 bp, Homo sapiens
cacacttaccagtgcccttaa

SEQ ID NO: 8079 - DNA, 21 bp, Homo sapiens
ctgaccaggtatcgtagtgaa

SEQ ID NO: 8080 - DNA, 21 bp, Homo sapiens
cgccagcatcatcatttccaa

SEQ ID NO: 8081 - DNA, 21 bp, Homo sapiens
ctggacctaaatctacgtata

SEQ ID NO: 8082 - DNA, 21 bp, Homo sapiens
aagcaggagttccactatata

SEQ ID NO: 8083 - DNA, 21 bp, Homo sapiens
aagaagatctttatcgaacaa

SEQ ID NO: 8084 - DNA, 21 bp, Homo sapiens
cacgaccaaccatatggcaaa

SEQ ID NO: 8085 - DNA, 21 bp, Homo sapiens
ccgtgttgttataaagcttaa

SEQ ID NO: 8086 - DNA, 21 bp, Homo sapiens
cagaggataaatagttgtcaa

SEQ ID NO: 8087 - DNA, 21 bp, Homo sapiens
atgaataatgttgtaactcga

SEQ ID NO: 8088 - DNA, 21 bp, Homo sapiens
gacacaatagatacaattgaa

SEQ ID NO: 8089 - DNA, 21 bp, Homo sapiens
aagatgataccaggcatataa

SEQ ID NO: 8090 - DNA, 21 bp, Homo sapiens
tatgtcggaattcttaattaa

SEQ ID NO: 8091 - DNA, 21 bp, Homo sapiens
ttgtctgatcataacattgta

SEQ ID NO: 8092 - DNA, 21 bp, Homo sapiens
aagaaacatctagaagttgta

SEQ ID NO: 8093 - DNA, 21 bp, Homo sapiens
caacatgatatttatgagtaa

SEQ ID NO: 8094 - DNA, 21 bp, Homo sapiens
ccgtaaggcgctactatataa

SEQ ID NO: 8095 - DNA, 21 bp, Homo sapiens
aagccacaggctaccacttta

SEQ ID NO: 8096 - DNA, 21 bp, Homo sapiens
ttgaacagtttgtgcagttta

SEQ ID NO: 8097 - DNA, 21 bp, Homo sapiens
cacacacttcgcagacatcaa

SEQ ID NO: 8098 - DNA, 21 bp, Homo sapiens
aacactttcatggtactgcaa

SEQ ID NO: 8099 - DNA, 21 bp, Homo sapiens
aagcagtaatgtcctaaagaa

SEQ ID NO: 8100 - DNA, 21 bp, Homo sapiens
cccagttgagaaagtaagaaa

SEQ ID NO: 8101 - DNA, 21 bp, Homo sapiens
cagctagatgttacaccgaaa

SEQ ID NO: 8102 - DNA, 21 bp, Homo sapiens
acgtgtcaggctacacataaa

SEQ ID NO: 8103 - DNA, 21 bp, Homo sapiens
cacattatggatctttgcata

SEQ ID NO: 8104 - DNA, 21 bp, Homo sapiens
ttgcatagaatgtcaagctaa

SEQ ID NO: 8105 - DNA, 21 bp, Homo sapiens
ctgctgttacctaattacaaa

SEQ ID NO: 8106 - DNA, 21 bp, Homo sapiens
aagaagcgctttgaagtgaaa

SEQ ID NO: 8107 - DNA, 21 bp, Homo sapiens
ccggagaaattccaggaacaa

SEQ ID NO: 8108 - DNA, 21 bp, Homo sapiens
cagagggacaatgttctacta

SEQ ID NO: 8109 - DNA, 21 bp, Homo sapiens
atggataagcatagtaacaaa

SEQ ID NO: 8110 - DNA, 21 bp, Homo sapiens
cagattattgttcatgcttta

SEQ ID NO: 8111 - DNA, 21 bp, Homo sapiens
cagctagtaatgagaatgata

SEQ ID NO: 8112 - DNA, 21 bp, Homo sapiens
aacctggtaactacaaatcta

SEQ ID NO: 8113 - DNA, 21 bp, Homo sapiens
tgggagtgctgcagtctttaa

SEQ ID NO: 8114 - DNA, 21 bp, Homo sapiens
caggcgttgttagatcagtat

SEQ ID NO: 8115 - DNA, 21 bp, Homo sapiens
tcgctgggaggtggcattcaa

SEQ ID NO: 8116 - DNA, 21 bp, Homo sapiens
ctccctcaatactgtggtgta

SEQ ID NO: 8117 - DNA, 21 bp, Homo sapiens
aagcccagttgtgaatatcaa

SEQ ID NO: 8118 - DNA, 21 bp, Homo sapiens
gaggtgggatttgatactgta

SEQ ID NO: 8119 - DNA, 21 bp, Homo sapiens
cagctgatgtgcggaagtcaa

SEQ ID NO: 8120 - DNA, 21 bp, Homo sapiens
cagtattcaaatagtcagaaa

SEQ ID NO: 8121 - DNA, 21 bp, Homo sapiens
cagtctgatctcaataaggaa

SEQ ID NO: 8122 - DNA, 21 bp, Homo sapiens
aacgaagtttcgagattctta

SEQ ID NO: 8123 - DNA, 21 bp, Homo sapiens
tcccactagctgattactata

SEQ ID NO: 8124 - DNA, 21 bp, Homo sapiens
cacccaaatttgtgcagctaa

SEQ ID NO: 8125 - DNA, 21 bp, Homo sapiens
aagggtattggtggcacttca

SEQ ID NO: 8126 - DNA, 21 bp, Homo sapiens
acccaaatttgtgcagctaaa

SEQ ID NO: 8127 - DNA, 21 bp, Homo sapiens
caggcaagactaattgacaat

SEQ ID NO: 8128 - DNA, 21 bp, Homo sapiens
agggaatactccaatggagaa

SEQ ID NO: 8129 - DNA, 21 bp, Homo sapiens
cacggagtttgcctgcatgaa

SEQ ID NO: 8130 - DNA, 21 bp, Homo sapiens
cacaaatgtattcatacgtaa

SEQ ID NO: 8131 - DNA, 21 bp, Homo sapiens
cagcaagtatctataatctat

SEQ ID NO: 8132 - DNA, 21 bp, Homo sapiens
tcgattgtggatgaacatgaa

SEQ ID NO: 8133 - DNA, 21 bp, Homo sapiens
aagaaacatgatcaacaatta

SEQ ID NO: 8134 - DNA, 21 bp, Homo sapiens
acggtggaaactggtatccga

SEQ ID NO: 8135 - DNA, 21 bp, Homo sapiens
cacagaagagttcttcaacaa

SEQ ID NO: 8136 - DNA, 21 bp, Homo sapiens
acgcatatcaacactgcagaa

SEQ ID NO: 8137 - DNA, 21 bp, Homo sapiens
tccctttactccggtgcttta

SEQ ID NO: 8138 - DNA, 21 bp, Homo sapiens
ctccggtgctttatatttaca

SEQ ID NO: 8139 - DNA, 21 bp, Homo sapiens
cagctttacagtgatagttaa

SEQ ID NO: 8140 - DNA, 21 bp, Homo sapiens
cagcacattgtgataacataa

SEQ ID NO: 8141 - DNA, 21 bp, Homo sapiens
ctgcttactaatgtattaata

SEQ ID NO: 8142 - DNA, 21 bp, Homo sapiens
atgaaggtttctacaacatat

SEQ ID NO: 8143 - DNA, 21 bp, Homo sapiens
cccgatcatgtttggcattaa

SEQ ID NO: 8144 - DNA, 21 bp, Homo sapiens
atggaaatacatatcgaatga

SEQ ID NO: 8145 - DNA, 21 bp, Homo sapiens
cacccggatcctggccatgaa

SEQ ID NO: 8146 - DNA, 21 bp, Homo sapiens
caaggtcatgatcaacctcaa

SEQ ID NO: 8147 - DNA, 21 bp, Homo sapiens
tgggaaggacaggtccaataa

SEQ ID NO: 8148 - DNA, 21 bp, Homo sapiens
cacgtgcagcccagtatggta

SEQ ID NO: 8149 - DNA, 21 bp, Homo sapiens
ccagaccaacatcgagaacaa

SEQ ID NO: 8150 - DNA, 21 bp, Homo sapiens
cccagtgaggactgtgactaa

SEQ ID NO: 8151 - DNA, 21 bp, Homo sapiens
cacgcagaagctcatcactaa

SEQ ID NO: 8152 - DNA, 21 bp, Homo sapiens
cagcaaggagatgttcaagaa

SEQ ID NO: 8153 - DNA, 21 bp, Homo sapiens
ccagagaaactccacaaggaa

SEQ ID NO: 8154 - DNA, 21 bp, Homo sapiens
caaccaggccttgcacttcaa

SEQ ID NO: 8155 - DNA, 21 bp, Homo sapiens
caggcgagagctacacacaca

SEQ ID NO: 8156 - DNA, 21 bp, Homo sapiens
ccacaccaatgctgaagtcaa

SEQ ID NO: 8157 - DNA, 21 bp, Homo sapiens
aagaataaatttgcaggtcaa

SEQ ID NO: 8158 - DNA, 21 bp, Homo sapiens
ccgtctaacattactcatgta

SEQ ID NO: 8159 - DNA, 21 bp, Homo sapiens
cagtgcaatattagaaaccca

SEQ ID NO: 8160 - DNA, 21 bp, Homo sapiens
acggtgtggttatgaccttta

SEQ ID NO: 8161 - DNA, 21 bp, Homo sapiens
caggttgggataagcattcat

SEQ ID NO: 8162 - DNA, 21 bp, Homo sapiens
aagcaatgagtgaacagctaa

SEQ ID NO: 8163 - DNA, 21 bp, Homo sapiens
acgctagttatttaactgcaa

SEQ ID NO: 8164 - DNA, 21 bp, Homo sapiens
gagcaagatagtacactttaa

SEQ ID NO: 8165 - DNA, 21 bp, Homo sapiens
ctccgagggtatcaagtataa

SEQ ID NO: 8166 - DNA, 21 bp, Homo sapiens
ctggattgagtctgtcattga

SEQ ID NO: 8167 - DNA, 21 bp, Homo sapiens
aagagtagatttgatatcaaa

SEQ ID NO: 8168 - DNA, 21 bp, Homo sapiens
ctgggtatcttggacaagtaa

SEQ ID NO: 8169 - DNA, 21 bp, Homo sapiens
taccaagtctttggatgttaa

SEQ ID NO: 8170 - DNA, 21 bp, Homo sapiens
tccagggatgtcatagttaaa

SEQ ID NO: 8171 - DNA, 21 bp, Homo sapiens
aacagaggacattgcaataaa

SEQ ID NO: 8172 - DNA, 21 bp, Homo sapiens
cagccagatattgacttatta

SEQ ID NO: 8173 - DNA, 21 bp, Homo sapiens
ctgcatctatagcatccatta

SEQ ID NO: 8174 - DNA, 21 bp, Homo sapiens
cccaaatttgttcgcccacaa

SEQ ID NO: 8175 - DNA, 21 bp, Homo sapiens
cccacagagatccgtccacaa

SEQ ID NO: 8176 - DNA, 21 bp, Homo sapiens
caggagtgtcggcttcgcaaa

SEQ ID NO: 8177 - DNA, 21 bp, Homo sapiens
gagatagttgactttgctaaa

SEQ ID NO: 8178 - DNA, 21 bp, Homo sapiens
catgaatgagctgcaactcaa

SEQ ID NO: 8179 - DNA, 21 bp, Homo sapiens
ctgaagaatgaagaagattaa

SEQ ID NO: 8180 - DNA, 21 bp, Homo sapiens
aaggaatgcatgagagcccta

SEQ ID NO: 8181 - DNA, 21 bp, Homo sapiens
ctgcttcggatccacactgta

SEQ ID NO: 8182 - DNA, 21 bp, Homo sapiens
tcccatgtctctgctcattta

SEQ ID NO: 8183 - DNA, 21 bp, Homo sapiens
caggatgtggacggactggta

SEQ ID NO: 8184 - DNA, 21 bp, Homo sapiens
accgatcaagtcaactcagta

SEQ ID NO: 8185 - DNA, 21 bp, Homo sapiens
cagcaatggtgcattgagcaa

SEQ ID NO: 8186 - DNA, 21 bp, Homo sapiens
tcaaatatacatcacatcaaa

SEQ ID NO: 8187 - DNA, 21 bp, Homo sapiens
cccaagtgggctacatttgaa

SEQ ID NO: 8188 - DNA, 21 bp, Homo sapiens
ctggagggtctctctgggaaa

SEQ ID NO: 8189 - DNA, 21 bp, Homo sapiens
aagcatgttaatgttaccatt

SEQ ID NO: 8190 - DNA, 21 bp, Homo sapiens
ctccagctagatcatcagtta

SEQ ID NO: 8191 - DNA, 21 bp, Homo sapiens
cagcctctgaatgaaatgcta

SEQ ID NO: 8192 - DNA, 21 bp, Homo sapiens
cagggtagttgggatctcaaa

SEQ ID NO: 8193 - DNA, 21 bp, Homo sapiens
gcgcttaataagaataagtaa

SEQ ID NO: 8194 - DNA, 21 bp, Homo sapiens
ctcatggatcctgataccaaa

SEQ ID NO: 8195 - DNA, 21 bp, Homo sapiens
aagcactatgctggtcatgaa

SEQ ID NO: 8196 - DNA, 21 bp, Homo sapiens
tcgtgtgatctccatctgtta

SEQ ID NO: 8197 - DNA, 21 bp, Homo sapiens
caggaaggaaacacaactgta

SEQ ID NO: 8198 - DNA, 21 bp, Homo sapiens
cagcaaggagctcctcatgaa

SEQ ID NO: 8199 - DNA, 21 bp, Homo sapiens
ctgtgtgttaaagaaattcaa

SEQ ID NO: 8200 - DNA, 21 bp, Homo sapiens
atggatttgtgttcaccttaa

SEQ ID NO: 8201 - DNA, 21 bp, Homo sapiens
acggacatcagaagcactcta

SEQ ID NO: 8202 - DNA, 21 bp, Homo sapiens
ttagtttgtgttaactatgaa

SEQ ID NO: 8203 - DNA, 21 bp, Homo sapiens
tccaataatgttagagttcat

SEQ ID NO: 8204 - DNA, 21 bp, Homo sapiens
cagttgtatgactttaaacaa

SEQ ID NO: 8205 - DNA, 21 bp, Homo sapiens
taagattgaattgaatcgtaa

SEQ ID NO: 8206 - DNA, 21 bp, Homo sapiens
cacgagtaagattaagagcaa

SEQ ID NO: 8207 - DNA, 21 bp, Homo sapiens
caggaacagattcaacatcta

SEQ ID NO: 8208 - DNA, 21 bp, Homo sapiens
cagaaagtgtataataagaaa

SEQ ID NO: 8209 - DNA, 21 bp, Homo sapiens
cccggtccctgtactcagaaa

SEQ ID NO: 8210 - DNA, 21 bp, Homo sapiens
aaggatgtcggtgagtggcaa

SEQ ID NO: 8211 - DNA, 21 bp, Homo sapiens
ccgctacaccctgcactataa

SEQ ID NO: 8212 - DNA, 21 bp, Homo sapiens
cgcgctcatcaagaagctgaa

SEQ ID NO: 8213 - DNA, 21 bp, Homo sapiens
ctgcacgttgactgtgggaaa

SEQ ID NO: 8214 - DNA, 21 bp, Homo sapiens
caccttctttgtggttctcat

SEQ ID NO: 8215 - DNA, 21 bp, Homo sapiens
caagaagtacatggaggagaa

SEQ ID NO: 8216 - DNA, 21 bp, Homo sapiens
aaaggtgaacctccagaacaa

SEQ ID NO: 8217 - DNA, 21 bp, Homo sapiens
cacatcctgaataaagaataa

SEQ ID NO: 8218 - DNA, 21 bp, Homo sapiens
tggctgcaacttcatctggaa

SEQ ID NO: 8219 - DNA, 21 bp, Homo sapiens
ctggctttggctgcaacttca

SEQ ID NO: 8220 - DNA, 21 bp, Homo sapiens
aagaataaagatctctcggaa

SEQ ID NO: 8221 - DNA, 21 bp, Homo sapiens
ccgatttaacaagaactacaa

SEQ ID NO: 8222 - DNA, 21 bp, Homo sapiens
caccaccaccgtgggcctaaa

SEQ ID NO: 8223 - DNA, 21 bp, Homo sapiens
cagcctgttatggctaactaa

SEQ ID NO: 8224 - DNA, 21 bp, Homo sapiens
agcctgttatggctaactaaa

SEQ ID NO: 8225 - DNA, 21 bp, Homo sapiens
ccagcctgttatggctaacta

SEQ ID NO: 8226 - DNA, 21 bp, Homo sapiens
cagatatggcctcttacagta

SEQ ID NO: 8227 - DNA, 21 bp, Homo sapiens
caggttcgtgaatatatggaa

SEQ ID NO: 8228 - DNA, 21 bp, Homo sapiens
acagattatatcactcggcta

SEQ ID NO: 8229 - DNA, 21 bp, Homo sapiens
cagcttcaaagggatatacaa

SEQ ID NO: 8230 - DNA, 21 bp, Homo sapiens
cagcctatcagtgaacatcaa

SEQ ID NO: 8231 - DNA, 21 bp, Homo sapiens
ttggtgagaatttgacttcaa

SEQ ID NO: 8232 - DNA, 21 bp, Homo sapiens
cccaaccagagcaacctacaa

SEQ ID NO: 8233 - DNA, 21 bp, Homo sapiens
tcgagggaagcacaagttcaa

SEQ ID NO: 8234 - DNA, 21 bp, Homo sapiens
gacgtcgtacatatttggaaa

SEQ ID NO: 8235 - DNA, 21 bp, Homo sapiens
ccctaatttctgtgaaataaa

SEQ ID NO: 8236 - DNA, 21 bp, Homo sapiens
ccggccctacccgcccttgaa

SEQ ID NO: 8237 - DNA, 21 bp, Homo sapiens
cagaccaaagatggattaata

SEQ ID NO: 8238 - DNA, 21 bp, Homo sapiens
ctcagaaatttggtcaggtta

SEQ ID NO: 8239 - DNA, 21 bp, Homo sapiens
tagcagatttatatgagccaa

SEQ ID NO: 8240 - DNA, 21 bp, Homo sapiens
cagtatctacctcaaaggcta

SEQ ID NO: 8241 - DNA, 21 bp, Homo sapiens
agccttatgcacctaattcaa

SEQ ID NO: 8242 - DNA, 21 bp, Homo sapiens
caccagcagggtatctcccaa

SEQ ID NO: 8243 - DNA, 21 bp, Homo sapiens
ataggcctggatcgaagtaaa

SEQ ID NO: 8244 - DNA, 21 bp, Homo sapiens
aggccgtccattagagattta

SEQ ID NO: 8245 - DNA, 21 bp, Homo sapiens
tcaggcctaattatacatcta

SEQ ID NO: 8246 - DNA, 21 bp, Homo sapiens
caccaatgagtccaagattga

SEQ ID NO: 8247 - DNA, 21 bp, Homo sapiens
tcccaactttcaagtctacaa

SEQ ID NO: 8248 - DNA, 21 bp, Homo sapiens
cacctacactttagacaatta

SEQ ID NO: 8249 - DNA, 21 bp, Homo sapiens
cccagtcatatcaaccataat

SEQ ID NO: 8250 - DNA, 21 bp, Homo sapiens
ccgacctgcctttacctttaa

SEQ ID NO: 8251 - DNA, 21 bp, Homo sapiens
aaggctataatccggccttaa

SEQ ID NO: 8252 - DNA, 21 bp, Homo sapiens
ctctatgatttccttactaaa

SEQ ID NO: 8253 - DNA, 21 bp, Homo sapiens
caagcaagaattaataaccta

SEQ ID NO: 8254 - DNA, 21 bp, Homo sapiens
cagactggtcttcagatacaa

SEQ ID NO: 8255 - DNA, 21 bp, Homo sapiens
tggccttaccatggacttgaa

SEQ ID NO: 8256 - DNA, 21 bp, Homo sapiens
caggatcttgtgcctggaaat

SEQ ID NO: 8257 - DNA, 21 bp, Homo sapiens
cggcagtcagatcctgcataa

SEQ ID NO: 8258 - DNA, 21 bp, Homo sapiens
acgcaagtcgtggatgagtaa

SEQ ID NO: 8259 - DNA, 21 bp, Homo sapiens
caggaactctttgctgaattt

SEQ ID NO: 8260 - DNA, 21 bp, Homo sapiens
ccagttaaacagaccagcaaa

SEQ ID NO: 8261 - DNA, 21 bp, Homo sapiens
cacgggcaaggtcaacatcaa

SEQ ID NO: 8262 - DNA, 21 bp, Homo sapiens
accgcggaacattgcactaaa

SEQ ID NO: 8263 - DNA, 21 bp, Homo sapiens
cagcaccgggatagacaggaa

SEQ ID NO: 8264 - DNA, 21 bp, Homo sapiens
ctggaagaacttcaaggaaca

SEQ ID NO: 8265 - DNA, 21 bp, Homo sapiens
tagatttggctgatccaatta

SEQ ID NO: 8266 - DNA, 21 bp, Homo sapiens
ctctctgtaatttgtgcttta

SEQ ID NO: 8267 - DNA, 21 bp, Homo sapiens
cagaatttgtgtgcaaatata

SEQ ID NO: 8268 - DNA, 21 bp, Homo sapiens
aaggagatcataagaaattaa

SEQ ID NO: 8269 - DNA, 21 bp, Homo sapiens
cagcctcagtttcacagttaa

SEQ ID NO: 8270 - DNA, 21 bp, Homo sapiens
ctgaatgaagttagagatgaa

SEQ ID NO: 8271 - DNA, 21 bp, Homo sapiens
taggacatgaaccaagacaaa

SEQ ID NO: 8272 - DNA, 21 bp, Homo sapiens
caggcattaattcatggacta

SEQ ID NO: 8273 - DNA, 21 bp, Homo sapiens
acagacattattactccatta

SEQ ID NO: 8274 - DNA, 21 bp, Homo sapiens
ttggatactgtcgtatttaaa

SEQ ID NO: 8275 - DNA, 21 bp, Homo sapiens
tcgggcttggaaggaaagcta

SEQ ID NO: 8276 - DNA, 21 bp, Homo sapiens
ccgcatctctggagtgtataa

SEQ ID NO: 8277 - DNA, 21 bp, Homo sapiens
accgcctgggtgagcacaata

SEQ ID NO: 8278 - DNA, 21 bp, Homo sapiens
ctgaaggtagatggtgttata

SEQ ID NO: 8279 - DNA, 21 bp, Homo sapiens
aaggtgatgttcacaaaggta

SEQ ID NO: 8280 - DNA, 21 bp, Homo sapiens
ttggcagagcatcgacttcaa

SEQ ID NO: 8281 - DNA, 21 bp, Homo sapiens
cagagcatcgacttcaagcaa

SEQ ID NO: 8282 - DNA, 21 bp, Homo sapiens
ctgaaatggagtaataaatga

SEQ ID NO: 8283 - DNA, 21 bp, Homo sapiens
caggctgaagctaaatagaga

SEQ ID NO: 8284 - DNA, 21 bp, Homo sapiens
tcccaggtttcttaagaataa

SEQ ID NO: 8285 - DNA, 21 bp, Homo sapiens
ctgaagctaaatagagaacaa

SEQ ID NO: 8286 - DNA, 21 bp, Homo sapiens
aacctagtcattaatgagtaa

SEQ ID NO: 8287 - DNA, 21 bp, Homo sapiens
atggattactttagatgcaaa

SEQ ID NO: 8288 - DNA, 21 bp, Homo sapiens
ctcaaagagcttagacttcaa

SEQ ID NO: 8289 - DNA, 21 bp, Homo sapiens
agcgtaataattactatagta

SEQ ID NO: 8290 - DNA, 21 bp, Homo sapiens
atgcagggtaatccagctaaa

SEQ ID NO: 8291 - DNA, 21 bp, Homo sapiens
aaggaacaattggacccgaaa

SEQ ID NO: 8292 - DNA, 21 bp, Homo sapiens
cccgtgtgacgtgtacacata

SEQ ID NO: 8293 - DNA, 21 bp, Homo sapiens
taggtgaagaaactaatgcaa

SEQ ID NO: 8294 - DNA, 21 bp, Homo sapiens
aaagaggattcagctgacaaa

SEQ ID NO: 8295 - DNA, 21 bp, Homo sapiens
attgatataagtgacatgaaa

SEQ ID NO: 8296 - DNA, 21 bp, Homo sapiens
aagcaacatggtacaccttga

SEQ ID NO: 8297 - DNA, 21 bp, Homo sapiens
cagcacttcctccagctccaa

SEQ ID NO: 8298 - DNA, 21 bp, Homo sapiens
ggcaccctgatgagtatttaa

SEQ ID NO: 8299 - DNA, 21 bp, Homo sapiens
cagaataaatttctaaattta

SEQ ID NO: 8300 - DNA, 21 bp, Homo sapiens
taggttgaagttcaacatgta

SEQ ID NO: 8301 - DNA, 21 bp, Homo sapiens
ttggctatactgcatcactta

SEQ ID NO: 8302 - DNA, 21 bp, Homo sapiens
tacaaccaataggaacaacaa

SEQ ID NO: 8303 - DNA, 21 bp, Homo sapiens
ctcctagtacttagaaataca

SEQ ID NO: 8304 - DNA, 21 bp, Homo sapiens
gaggttaaagacagtcatata

SEQ ID NO: 8305 - DNA, 21 bp, Homo sapiens
cagaatgtaaggaaactataa

SEQ ID NO: 8306 - DNA, 21 bp, Homo sapiens
caggaaattgctcaagaacta

SEQ ID NO: 8307 - DNA, 21 bp, Homo sapiens
ctggatgagaaggttagtgaa

SEQ ID NO: 8308 - DNA, 21 bp, Homo sapiens
cacaggcaactccaaaggtta

SEQ ID NO: 8309 - DNA, 21 bp, Homo sapiens
cacctggcacatggcggagaa

SEQ ID NO: 8310 - DNA, 21 bp, Homo sapiens
cccgcccggcagcatcctcta

SEQ ID NO: 8311 - DNA, 21 bp, Homo sapiens
caggttcttcctggcagtgca

SEQ ID NO: 8312 - DNA, 21 bp, Homo sapiens
cagggacgtgaccttgactta

SEQ ID NO: 8313 - DNA, 21 bp, Homo sapiens
acggaaagagactttggtgta

SEQ ID NO: 8314 - DNA, 21 bp, Homo sapiens
gagcatcatagggttacttta

SEQ ID NO: 8315 - DNA, 21 bp, Homo sapiens
tcggtgtggattgattggaaa

SEQ ID NO: 8316 - DNA, 21 bp, Homo sapiens
ctggaggatgctatattgata

SEQ ID NO: 8317 - DNA, 21 bp, Homo sapiens
tccgagtataatgacgtggta

SEQ ID NO: 8318 - DNA, 21 bp, Homo sapiens
acgtggtatcccgaagcctaa

SEQ ID NO: 8319 - DNA, 21 bp, Homo sapiens
cagagagttatggaaatataa

SEQ ID NO: 8320 - DNA, 21 bp, Homo sapiens
ctgttctttcctaaagatcaa

SEQ ID NO: 8321 - DNA, 21 bp, Homo sapiens
cagcgtcttccattccagaaa

SEQ ID NO: 8322 - DNA, 21 bp, Homo sapiens
tgggaacaaatgagacacata

SEQ ID NO: 8323 - DNA, 21 bp, Homo sapiens
ccggcttgagctcaccaccta

SEQ ID NO: 8324 - DNA, 21 bp, Homo sapiens
agggatatccatgcttatgta

SEQ ID NO: 8325 - DNA, 21 bp, Homo sapiens
tcagattaaatagcattataa

SEQ ID NO: 8326 - DNA, 21 bp, Homo sapiens
atcatttattggattattaaa

SEQ ID NO: 8327 - DNA, 21 bp, Homo sapiens
cagaataaattattagctgaa

SEQ ID NO: 8328 - DNA, 21 bp, Homo sapiens
cactgatgtcgtggcgcttta

SEQ ID NO: 8329 - DNA, 21 bp, Homo sapiens
aagccacgggattgtatgaaa

SEQ ID NO: 8330 - DNA, 21 bp, Homo sapiens
tccctttagtttgttacagta

SEQ ID NO: 8331 - DNA, 21 bp, Homo sapiens
aacggcctataggattgttaa

SEQ ID NO: 8332 - DNA, 21 bp, Homo sapiens
agccacgggattgtatgaaat

SEQ ID NO: 8333 - DNA, 21 bp, Homo sapiens
cccgaggacaccaccaccgaa

SEQ ID NO: 8334 - DNA, 21 bp, Homo sapiens
caagtgtatcatcactgccaa

SEQ ID NO: 8335 - DNA, 21 bp, Homo sapiens
cagctggaataacaagcccaa

SEQ ID NO: 8336 - DNA, 21 bp, Homo sapiens
aacacctatttcttaactcaa

SEQ ID NO: 8337 - DNA, 21 bp, Homo sapiens
caggtgtgttaccgagtggaa

SEQ ID NO: 8338 - DNA, 21 bp, Homo sapiens
cgcaaggattatgatcccaaa

SEQ ID NO: 8339 - DNA, 21 bp, Homo sapiens
caggataagacggaatggaaa

SEQ ID NO: 8340 - DNA, 21 bp, Homo sapiens
cagcatgtaggtagcgtccta

SEQ ID NO: 8341 - DNA, 21 bp, Homo sapiens
ccggctcaggagcaagatgaa

SEQ ID NO: 8342 - DNA, 21 bp, Homo sapiens
aaggaaatcatgagcctgaaa

SEQ ID NO: 8343 - DNA, 21 bp, Homo sapiens
cgggaccagcctgaggtgtaa

SEQ ID NO: 8344 - DNA, 21 bp, Homo sapiens
ccgtgatgatattgatctcaa

SEQ ID NO: 8345 - DNA, 21 bp, Homo sapiens
ctgctgtaatttataaggcaa

SEQ ID NO: 8346 - DNA, 21 bp, Homo sapiens
cagggaggagaggctgcataa

SEQ ID NO: 8347 - DNA, 21 bp, Homo sapiens
ctcgaggagctgggctagata

SEQ ID NO: 8348 - DNA, 21 bp, Homo sapiens
ttggatgctatgggaattaca

SEQ ID NO: 8349 - DNA, 21 bp, Homo sapiens
ctggccttatggagtatggaa

SEQ ID NO: 8350 - DNA, 21 bp, Homo sapiens
aacattgaagtcttccagaaa

SEQ ID NO: 8351 - DNA, 21 bp, Homo sapiens
ctggacaaacccagagatcaa

SEQ ID NO: 8352 - DNA, 21 bp, Homo sapiens
tgcaagattgttcctattaaa

SEQ ID NO: 8353 - DNA, 21 bp, Homo sapiens
cagcctcaggaaacaaatgaa

SEQ ID NO: 8354 - DNA, 21 bp, Homo sapiens
tccctttatctttatcaagaa

SEQ ID NO: 8355 - DNA, 21 bp, Homo sapiens
aacaattgtgactcagctgaa

SEQ ID NO: 8356 - DNA, 21 bp, Homo sapiens
tcccagagttactttaataaa

SEQ ID NO: 8357 - DNA, 21 bp, Homo sapiens
aagctatgaattcaccagtaa

SEQ ID NO: 8358 - DNA, 21 bp, Homo sapiens
cagggccgtctcagtctcata

SEQ ID NO: 8359 - DNA, 21 bp, Homo sapiens
ccggcattcaacctacaggaa

SEQ ID NO: 8360 - DNA, 21 bp, Homo sapiens
ctacctcgattacaacattta

SEQ ID NO: 8361 - DNA, 21 bp, Homo sapiens
gccaatggatgcgaacttaaa

SEQ ID NO: 8362 - DNA, 21 bp, Homo sapiens
aaggtagatctatcaagccaa

SEQ ID NO: 8363 - DNA, 21 bp, Homo sapiens
ttggataaaggttgaaataaa

SEQ ID NO: 8364 - DNA, 21 bp, Homo sapiens
cacccgctccttcacctttaa

SEQ ID NO: 8365 - DNA, 21 bp, Homo sapiens
caggaacgttatgaagcatca

SEQ ID NO: 8366 - DNA, 21 bp, Homo sapiens
caggcgagcgtggctaagaaa

SEQ ID NO: 8367 - DNA, 21 bp, Homo sapiens
aaggaagataacggactgtaa

SEQ ID NO: 8368 - DNA, 21 bp, Homo sapiens
caggaatgcatgagatttcaa

SEQ ID NO: 8369 - DNA, 21 bp, Homo sapiens
ccgtgtgatctttataattta

SEQ ID NO: 8370 - DNA, 21 bp, Homo sapiens
atacatatatccattatatta

SEQ ID NO: 8371 - DNA, 21 bp, Homo sapiens
atccattatattagtagtgga

SEQ ID NO: 8372 - DNA, 21 bp, Homo sapiens
tcggttgggtgtttatataat

SEQ ID NO: 8373 - DNA, 21 bp, Homo sapiens
tggaaacaaagtaaactataa

SEQ ID NO: 8374 - DNA, 21 bp, Homo sapiens
ctcccttatgtagttgaaata

SEQ ID NO: 8375 - DNA, 21 bp, Homo sapiens
cagatttacgagtgaaaggaa

SEQ ID NO: 8376 - DNA, 21 bp, Homo sapiens
tggaatgtcgtcagtggcaaa

SEQ ID NO: 8377 - DNA, 21 bp, Homo sapiens
cacggtggtggagccctacaa

SEQ ID NO: 8378 - DNA, 21 bp, Homo sapiens
ccagcagatgttcgatgccaa

SEQ ID NO: 8379 - DNA, 21 bp, Homo sapiens
gcggatcagcgtctactacaa

SEQ ID NO: 8380 - DNA, 21 bp, Homo sapiens
ttgctgtcagatacccttaaa

SEQ ID NO: 8381 - DNA, 21 bp, Homo sapiens
aactccaaacatcgcgattaa

SEQ ID NO: 8382 - DNA, 21 bp, Homo sapiens
ctcattgaaatcaaggcccaa

SEQ ID NO: 8383 - DNA, 21 bp, Homo sapiens
tacgtcagcattcaggttcaa

SEQ ID NO: 8384 - DNA, 21 bp, Homo sapiens
aacgattaatgtttcattatt

SEQ ID NO: 8385 - DNA, 21 bp, Homo sapiens
cagcttgatcaggacatagaa

SEQ ID NO: 8386 - DNA, 21 bp, Homo sapiens
aaggtatttcagagaaggaaa

SEQ ID NO: 8387 - DNA, 21 bp, Homo sapiens
gaggataaattacaagatcaa

SEQ ID NO: 8388 - DNA, 21 bp, Homo sapiens
atgcaatgtaatgcagtttaa

SEQ ID NO: 8389 - DNA, 21 bp, Homo sapiens
gaggcacccattgataagaaa

SEQ ID NO: 8390 - DNA, 21 bp, Homo sapiens
acccattgataagaaaggcaa

SEQ ID NO: 8391 - DNA, 21 bp, Homo sapiens
cacaattagcagagtatcaca

SEQ ID NO: 8392 - DNA, 21 bp, Homo sapiens
tccaaaggttatgactttgaa

SEQ ID NO: 8393 - DNA, 21 bp, Homo sapiens
tccctgggtcgtgtcaggaaa

SEQ ID NO: 8394 - DNA, 21 bp, Homo sapiens
ccgagaccacttaatgacaaa

SEQ ID NO: 8395 - DNA, 21 bp, Homo sapiens
atggcagatctgggatctaaa

SEQ ID NO: 8396 - DNA, 21 bp, Homo sapiens
ttgaatgaatttagcaccaaa

SEQ ID NO: 8397 - DNA, 21 bp, Homo sapiens
aagagatttattaaattgtaa

SEQ ID NO: 8398 - DNA, 21 bp, Homo sapiens
aaggctaagctttaccataaa

SEQ ID NO: 8399 - DNA, 21 bp, Homo sapiens
caccatgtgcctgttggtcaa

SEQ ID NO: 8400 - DNA, 21 bp, Homo sapiens
ccggattgtcttcgccatcat

SEQ ID NO: 8401 - DNA, 21 bp, Homo sapiens
ccctaaatcaaatcaatatta

SEQ ID NO: 8402 - DNA, 21 bp, Homo sapiens
cacatcaatttgagttgttca

SEQ ID NO: 8403 - DNA, 21 bp, Homo sapiens
ccggcgggtccatatggaata

SEQ ID NO: 8404 - DNA, 21 bp, Homo sapiens
caagataaattaatctcacta

SEQ ID NO: 8405 - DNA, 21 bp, Homo sapiens
tcgcatggactttaactgcaa

SEQ ID NO: 8406 - DNA, 21 bp, Homo sapiens
ccactacctaagagtatttaa

SEQ ID NO: 8407 - DNA, 21 bp, Homo sapiens
tacgactttgtatcagcataa

SEQ ID NO: 8408 - DNA, 21 bp, Homo sapiens
taccgcgaatgcatcagctaa

SEQ ID NO: 8409 - DNA, 21 bp, Homo sapiens
caggcatgttgtataaatgta

SEQ ID NO: 8410 - DNA, 21 bp, Homo sapiens
cccgctgttattgaggagtaa

SEQ ID NO: 8411 - DNA, 21 bp, Homo sapiens
cagaagaatgttctgattgaa

SEQ ID NO: 8412 - DNA, 21 bp, Homo sapiens
aaggtaattaagaatccagta

SEQ ID NO: 8413 - DNA, 21 bp, Homo sapiens
cagattcctctggattatgaa

SEQ ID NO: 8414 - DNA, 21 bp, Homo sapiens
aagacgcttgaagagaataaa

SEQ ID NO: 8415 - DNA, 21 bp, Homo sapiens
acgccttggctgagaaggcaa

SEQ ID NO: 8416 - DNA, 21 bp, Homo sapiens
cacgaggacatgaccctgcta

SEQ ID NO: 8417 - DNA, 21 bp, Homo sapiens
ctgcaggtgagaggatttaaa

SEQ ID NO: 8418 - DNA, 21 bp, Homo sapiens
caccttggacaagccacacaa

SEQ ID NO: 8419 - DNA, 21 bp, Homo sapiens
ccgtgagaattcagcatggaa

SEQ ID NO: 8420 - DNA, 21 bp, Homo sapiens
atcgaaattcatccgacgaaa

SEQ ID NO: 8421 - DNA, 21 bp, Homo sapiens
ctactattgattagagcctaa

SEQ ID NO: 8422 - DNA, 21 bp, Homo sapiens
tccatgtaactgtatgcataa

SEQ ID NO: 8423 - DNA, 21 bp, Homo sapiens
aagaaataccagactgagcaa

SEQ ID NO: 8424 - DNA, 21 bp, Homo sapiens
cacgggcaacctcctggacaa

SEQ ID NO: 8425 - DNA, 21 bp, Homo sapiens
cagcaagaatcctcagaagta

SEQ ID NO: 8426 - DNA, 21 bp, Homo sapiens
ctgcttctcctgcctaataaa

SEQ ID NO: 8427 - DNA, 21 bp, Homo sapiens
caggaagttctgagaaccaaa

SEQ ID NO: 8428 - DNA, 21 bp, Homo sapiens
aaggaactttccaaagctgaa

SEQ ID NO: 8429 - DNA, 21 bp, Homo sapiens
cagggtcataaaggatttcat

SEQ ID NO: 8430 - DNA, 21 bp, Homo sapiens
ccgcatgaagatcgagctctt

SEQ ID NO: 8431 - DNA, 21 bp, Homo sapiens
aagaaatgaaagaaagtataa

SEQ ID NO: 8432 - DNA, 21 bp, Homo sapiens
ctagataatgtcaaacaagaa

SEQ ID NO: 8433 - DNA, 21 bp, Homo sapiens
accgactggcaggataagaaa

SEQ ID NO: 8434 - DNA, 21 bp, Homo sapiens
ctgaccgaactggacactaaa

SEQ ID NO: 8435 - DNA, 21 bp, Homo sapiens
ctcctggagatcattaaagaa

SEQ ID NO: 8436 - DNA, 21 bp, Homo sapiens
ctcattgctgttggtcttcaa

SEQ ID NO: 8437 - DNA, 21 bp, Homo sapiens
ctggacctgttgtcaccttaa

SEQ ID NO: 8438 - DNA, 21 bp, Homo sapiens
acccaaatgattctcttataa

SEQ ID NO: 8439 - DNA, 21 bp, Homo sapiens
atggataagaatactcctgta

SEQ ID NO: 8440 - DNA, 21 bp, Homo sapiens
ttcgtgcttatctgaaatcta

SEQ ID NO: 8441 - DNA, 21 bp, Homo sapiens
cagaacaagtagaacagctaa

SEQ ID NO: 8442 - DNA, 21 bp, Homo sapiens
aacgcgttaatttccctcaaa

SEQ ID NO: 8443 - DNA, 21 bp, Homo sapiens
cccaggctttagagaagtata

SEQ ID NO: 8444 - DNA, 21 bp, Homo sapiens
ccggcgtaagagtgaagccaa

SEQ ID NO: 8445 - DNA, 21 bp, Homo sapiens
aagcaacaggaagcaaatgaa

SEQ ID NO: 8446 - DNA, 21 bp, Homo sapiens
atgatataccaaggtaataaa

SEQ ID NO: 8447 - DNA, 21 bp, Homo sapiens
aaggtaataaatgctgtttat

SEQ ID NO: 8448 - DNA, 21 bp, Homo sapiens
cagtatgatataccaaggtaa

SEQ ID NO: 8449 - DNA, 21 bp, Homo sapiens
cagcatgtcagtggcatttaa

SEQ ID NO: 8450 - DNA, 21 bp, Homo sapiens
cagggagatcaaggacttcaa

SEQ ID NO: 8451 - DNA, 21 bp, Homo sapiens
ccggccgagtccacacagcaa

SEQ ID NO: 8452 - DNA, 21 bp, Homo sapiens
aagacctgacttggagacaaa

SEQ ID NO: 8453 - DNA, 21 bp, Homo sapiens
caccaagctatggatcatcat

SEQ ID NO: 8454 - DNA, 21 bp, Homo sapiens
aagggcatcgataaccacaca

SEQ ID NO: 8455 - DNA, 21 bp, Homo sapiens
cagtctagtgccaaagattaa

SEQ ID NO: 8456 - DNA, 21 bp, Homo sapiens
ccaggaatgatgggtaatcaa

SEQ ID NO: 8457 - DNA, 21 bp, Homo sapiens
aaggattggcattcagtcaaa

SEQ ID NO: 8458 - DNA, 21 bp, Homo sapiens
agggctgttaacattagcaaa

SEQ ID NO: 8459 - DNA, 21 bp, Homo sapiens
cgccctggaacccaaattcaa

SEQ ID NO: 8460 - DNA, 21 bp, Homo sapiens
ccgcgtagcccgagtatgtaa

SEQ ID NO: 8461 - DNA, 21 bp, Homo sapiens
cagatctgcatcaatactgaa

SEQ ID NO: 8462 - DNA, 21 bp, Homo sapiens
cagatggatgaaagcaaccaa

SEQ ID NO: 8463 - DNA, 21 bp, Homo sapiens
ccggtgtatatccgaaatgaa

SEQ ID NO: 8464 - DNA, 21 bp, Homo sapiens
aaggaaggtcttgaatttcaa

SEQ ID NO: 8465 - DNA, 21 bp, Homo sapiens
cacgtaaatgaaaccactcaa

SEQ ID NO: 8466 - DNA, 21 bp, Homo sapiens
ctgggacattgtaatcataaa

SEQ ID NO: 8467 - DNA, 21 bp, Homo sapiens
caagtcattaacacactttaa

SEQ ID NO: 8468 - DNA, 21 bp, Homo sapiens
cagcggcactctgtacaagaa

SEQ ID NO: 8469 - DNA, 21 bp, Homo sapiens
acgcaaagtcatcacctttaa

SEQ ID NO: 8470 - DNA, 21 bp, Homo sapiens
cagcaaagcctttaaagtgaa

SEQ ID NO: 8471 - DNA, 21 bp, Homo sapiens
gaggctgatgctttaaatgaa

SEQ ID NO: 8472 - DNA, 21 bp, Homo sapiens
caggagtggatagaagccaaa

SEQ ID NO: 8473 - DNA, 21 bp, Homo sapiens
aaagcattctttgtctattaa

SEQ ID NO: 8474 - DNA, 21 bp, Homo sapiens
ctggacaaacacagcaatcca

SEQ ID NO: 8475 - DNA, 21 bp, Homo sapiens
atgggatttaatgacctttga

SEQ ID NO: 8476 - DNA, 21 bp, Homo sapiens
aacccatatgacagcgtgaaa

SEQ ID NO: 8477 - DNA, 21 bp, Homo sapiens
aacgaagttatggcagagtta

SEQ ID NO: 8478 - DNA, 21 bp, Homo sapiens
agcgctaatgaacatcttaaa

SEQ ID NO: 8479 - DNA, 21 bp, Homo sapiens
ttcgatatattggaggatgaa

SEQ ID NO: 8480 - DNA, 21 bp, Homo sapiens
taccctcagctgtatgtgaaa

SEQ ID NO: 8481 - DNA, 21 bp, Homo sapiens
ctgggatatctgagaagtata

SEQ ID NO: 8482 - DNA, 21 bp, Homo sapiens
tcagatgatagtaaagatcaa

SEQ ID NO: 8483 - DNA, 21 bp, Homo sapiens
ctcattgtccaccttactaaa

SEQ ID NO: 8484 - DNA, 21 bp, Homo sapiens
cgggaatattgccagagttaa

SEQ ID NO: 8485 - DNA, 21 bp, Homo sapiens
tagggattctttgtacaggaa

SEQ ID NO: 8486 - DNA, 21 bp, Homo sapiens
cagagttaacctgaccaccaa

SEQ ID NO: 8487 - DNA, 21 bp, Homo sapiens
ctgaatggatacaaagaatga

SEQ ID NO: 8488 - DNA, 21 bp, Homo sapiens
cgcttcattgatcgaattcaa

SEQ ID NO: 8489 - DNA, 21 bp, Homo sapiens
aagggtgatgtacacatgtat

SEQ ID NO: 8490 - DNA, 21 bp, Homo sapiens
acggaggagaattaagtccta

SEQ ID NO: 8491 - DNA, 21 bp, Homo sapiens
ctggctttaataaatatttca

SEQ ID NO: 8492 - DNA, 21 bp, Homo sapiens
caggcagatcctacaaagcta

SEQ ID NO: 8493 - DNA, 21 bp, Homo sapiens
aaactcattcaaggaggtgaa

SEQ ID NO: 8494 - DNA, 21 bp, Homo sapiens
cagccgggatgcactaggcaa

SEQ ID NO: 8495 - DNA, 21 bp, Homo sapiens
caagtttgggatggacctgaa

SEQ ID NO: 8496 - DNA, 21 bp, Homo sapiens
cagtgagatcctggacaagaa

SEQ ID NO: 8497 - DNA, 21 bp, Homo sapiens
ctcgataatctggataactga

SEQ ID NO: 8498 - DNA, 21 bp, Homo sapiens
ttgcctgaagttgtattgaaa

SEQ ID NO: 8499 - DNA, 21 bp, Homo sapiens
ttgctcatattgaccaattta

SEQ ID NO: 8500 - DNA, 21 bp, Homo sapiens
tagagttggccctacgattaa

SEQ ID NO: 8501 - DNA, 21 bp, Homo sapiens
cccgagcttggaacttcgtta

SEQ ID NO: 8502 - DNA, 21 bp, Homo sapiens
gtggatggagttataaaggaa

SEQ ID NO: 8503 - DNA, 21 bp, Homo sapiens
aaggacagtcttacagcgtca

SEQ ID NO: 8504 - DNA, 21 bp, Homo sapiens
cagatcgtttctcatctctaa

SEQ ID NO: 8505 - DNA, 21 bp, Homo sapiens
cagaaatttcatgaggaggta

SEQ ID NO: 8506 - DNA, 21 bp, Homo sapiens
cagggtgacctgttgaccaaa

SEQ ID NO: 8507 - DNA, 21 bp, Homo sapiens
tccggaacactgagagatcaa

SEQ ID NO: 8508 - DNA, 21 bp, Homo sapiens
ctgaacagagatgatgattca

SEQ ID NO: 8509 - DNA, 21 bp, Homo sapiens
caggattccagtcctctacta

SEQ ID NO: 8510 - DNA, 21 bp, Homo sapiens
acccggcaacacgaaagcaaa

SEQ ID NO: 8511 - DNA, 21 bp, Homo sapiens
accatgaaccacattgtgcaa

SEQ ID NO: 8512 - DNA, 21 bp, Homo sapiens
ccaggacctccacaccattaa

SEQ ID NO: 8513 - DNA, 21 bp, Homo sapiens
acgggcatgtatcgatacaaa

SEQ ID NO: 8514 - DNA, 21 bp, Homo sapiens
caacgtcgtcatcaactataa

SEQ ID NO: 8515 - DNA, 21 bp, Homo sapiens
ccgaaagtcatataagatgaa

SEQ ID NO: 8516 - DNA, 21 bp, Homo sapiens
atggcttgtcatcctgaataa

SEQ ID NO: 8517 - DNA, 21 bp, Homo sapiens
cagccactcgacgaccctgaa

SEQ ID NO: 8518 - DNA, 21 bp, Homo sapiens
cagggattaatgaaactgcca

SEQ ID NO: 8519 - DNA, 21 bp, Homo sapiens
cacctgcattctttacacata

SEQ ID NO: 8520 - DNA, 21 bp, Homo sapiens
aaggatgaaactggcttctat

SEQ ID NO: 8521 - DNA, 21 bp, Homo sapiens
cacgtggaaatctccgttatt

SEQ ID NO: 8522 - DNA, 21 bp, Homo sapiens
gcccaaggacttctaacaata

SEQ ID NO: 8523 - DNA, 21 bp, Homo sapiens
ctcgactaacagggactataa

SEQ ID NO: 8524 - DNA, 21 bp, Homo sapiens
cccaaggacttctaacaataa

SEQ ID NO: 8525 - DNA, 21 bp, Homo sapiens
cactggaatgttaaacactaa

SEQ ID NO: 8526 - DNA, 21 bp, Homo sapiens
cccggaatatctggagctcaa

SEQ ID NO: 8527 - DNA, 21 bp, Homo sapiens
tcgacatgacttggaagataa

SEQ ID NO: 8528 - DNA, 21 bp, Homo sapiens
cccgagtagcatcaatggttt

SEQ ID NO: 8529 - DNA, 21 bp, Homo sapiens
tcccgacaactcacagagaaa

SEQ ID NO: 8530 - DNA, 21 bp, Homo sapiens
ccaaattagctctactcctaa

SEQ ID NO: 8531 - DNA, 21 bp, Homo sapiens
cagcttgatagggaaaggtaa

SEQ ID NO: 8532 - DNA, 21 bp, Homo sapiens
cccacacttgtcattaatgaa

SEQ ID NO: 8533 - DNA, 21 bp, Homo sapiens
tagagggcaggtgttcataaa

SEQ ID NO: 8534 - DNA, 21 bp, Homo sapiens
tagagctgatttgatggacaa

SEQ ID NO: 8535 - DNA, 21 bp, Homo sapiens
aagaataccttaattccttaa

SEQ ID NO: 8536 - DNA, 21 bp, Homo sapiens
aagagccaatttaacaaacta

SEQ ID NO: 8537 - DNA, 21 bp, Homo sapiens
cgggaaggtactcgccctaaa

SEQ ID NO: 8538 - DNA, 21 bp, Homo sapiens
ctcaagtgtgtttgaaaccaa

SEQ ID NO: 8539 - DNA, 21 bp, Homo sapiens
caggaagtcgatagtctcaaa

SEQ ID NO: 8540 - DNA, 21 bp, Homo sapiens
atcgaggatctgccaacttca

SEQ ID NO: 8541 - DNA, 21 bp, Homo sapiens
acggatcttgtggcccaatta

SEQ ID NO: 8542 - DNA, 21 bp, Homo sapiens
cacgagaagaacgaatcatta

SEQ ID NO: 8543 - DNA, 21 bp, Homo sapiens
accagattcattacaattcaa

SEQ ID NO: 8544 - DNA, 21 bp, Homo sapiens
ctgcttattgttaaccctata

SEQ ID NO: 8545 - DNA, 21 bp, Homo sapiens
ctgggacacgctggagcatta

SEQ ID NO: 8546 - DNA, 21 bp, Homo sapiens
cagcagagcctctgacagtaa

SEQ ID NO: 8547 - DNA, 21 bp, Homo sapiens
ctgcagaaccttggcctgaaa

SEQ ID NO: 8548 - DNA, 21 bp, Homo sapiens
aacctcaaattatataatgta

SEQ ID NO: 8549 - DNA, 21 bp, Homo sapiens
cagcgatatgttcaactatga

SEQ ID NO: 8550 - DNA, 21 bp, Homo sapiens
aaggaggagtgcctcaagaaa

SEQ ID NO: 8551 - DNA, 21 bp, Homo sapiens
ttctagaacttcataagataa

SEQ ID NO: 8552 - DNA, 21 bp, Homo sapiens
cggcttaaagtgcagctcaaa

SEQ ID NO: 8553 - DNA, 21 bp, Homo sapiens
cgggaactcttcgaacagtat

SEQ ID NO: 8554 - DNA, 21 bp, Homo sapiens
cagggtcctcacctagctcta

SEQ ID NO: 8555 - DNA, 21 bp, Homo sapiens
ctgaaatttattattagacaa

SEQ ID NO: 8556 - DNA, 21 bp, Homo sapiens
caggagaaaggttactgtaaa

SEQ ID NO: 8557 - DNA, 21 bp, Homo sapiens
ctgctattcagtcataatcaa

SEQ ID NO: 8558 - DNA, 21 bp, Homo sapiens
caccagcatgttccagttata

SEQ ID NO: 8559 - DNA, 21 bp, Homo sapiens
tcgtttcattgtagtggttaa

SEQ ID NO: 8560 - DNA, 21 bp, Homo sapiens
caggtcatgtgcaagagccta

SEQ ID NO: 8561 - DNA, 21 bp, Homo sapiens
ctgataggacttataaactat

SEQ ID NO: 8562 - DNA, 21 bp, Homo sapiens
tccatctgtgttgatacataa

SEQ ID NO: 8563 - DNA, 21 bp, Homo sapiens
cgggaaatttatgatattatt

SEQ ID NO: 8564 - DNA, 21 bp, Homo sapiens
ccgggaaatttatgatattat

SEQ ID NO: 8565 - DNA, 21 bp, Homo sapiens
ccggtttgagaagatcagcaa

SEQ ID NO: 8566 - DNA, 21 bp, Homo sapiens
ttggtatggtgtaacactaaa

SEQ ID NO: 8567 - DNA, 21 bp, Homo sapiens
cacgcaggacatcaacaaaca

SEQ ID NO: 8568 - DNA, 21 bp, Homo sapiens
cagacagtgaaacaccaacta

SEQ ID NO: 8569 - DNA, 21 bp, Homo sapiens
cggagggtaaatgccagcaaa

SEQ ID NO: 8570 - DNA, 21 bp, Homo sapiens
cacgccttacttcttgcctta

SEQ ID NO: 8571 - DNA, 21 bp, Homo sapiens
cccggtgaatgccgatgccta

SEQ ID NO: 8572 - DNA, 21 bp, Homo sapiens
ccggatgcactcaacaaccta

SEQ ID NO: 8573 - DNA, 21 bp, Homo sapiens
cctgaagatgtagaccctcaa

SEQ ID NO: 8574 - DNA, 21 bp, Homo sapiens
aaggctattattgtgatcaaa

SEQ ID NO: 8575 - DNA, 21 bp, Homo sapiens
ctggaagaatctgaaataaga

SEQ ID NO: 8576 - DNA, 21 bp, Homo sapiens
cactgtactgatgacctttaa

SEQ ID NO: 8577 - DNA, 21 bp, Homo sapiens
cagacatggatcattgtccta

SEQ ID NO: 8578 - DNA, 21 bp, Homo sapiens
cacaaatgcaattattattaa

SEQ ID NO: 8579 - DNA, 21 bp, Homo sapiens
caggagatggtactacttcaa

SEQ ID NO: 8580 - DNA, 21 bp, Homo sapiens
tagaacatcattacaaactaa

SEQ ID NO: 8581 - DNA, 21 bp, Homo sapiens
aaccttcgagatattgatgaa

SEQ ID NO: 8582 - DNA, 21 bp, Homo sapiens
ctggacttgaacagtatgcta

SEQ ID NO: 8583 - DNA, 21 bp, Homo sapiens
gaggctgtgtatagaaacata

SEQ ID NO: 8584 - DNA, 21 bp, Homo sapiens
aaggctgtatttgtagtagta

SEQ ID NO: 8585 - DNA, 21 bp, Homo sapiens
gtggctgatgatggtaaataa

SEQ ID NO: 8586 - DNA, 21 bp, Homo sapiens
aagaggcgagataatgatgaa

SEQ ID NO: 8587 - DNA, 21 bp, Homo sapiens
tcccattatctcgaccactga

SEQ ID NO: 8588 - DNA, 21 bp, Homo sapiens
ctggtttgtgacgccggccaa

SEQ ID NO: 8589 - DNA, 21 bp, Homo sapiens
atggccgtctgcagcgaataa

SEQ ID NO: 8590 - DNA, 21 bp, Homo sapiens
aagtctcggcctccacattaa

SEQ ID NO: 8591 - DNA, 21 bp, Homo sapiens
tggaacaattgaagaaataaa

SEQ ID NO: 8592 - DNA, 21 bp, Homo sapiens
gaggaaattctgaaacaggaa

SEQ ID NO: 8593 - DNA, 21 bp, Homo sapiens
ctggtacaaatcaaacatgaa

SEQ ID NO: 8594 - DNA, 21 bp, Homo sapiens
cagggagagagtcttcaataa

SEQ ID NO: 8595 - DNA, 21 bp, Homo sapiens
tggcctactgttacacattaa

SEQ ID NO: 8596 - DNA, 21 bp, Homo sapiens
caccaagaagattaaccctga

SEQ ID NO: 8597 - DNA, 21 bp, Homo sapiens
ttccagattgaccatgaataa

SEQ ID NO: 8598 - DNA, 21 bp, Homo sapiens
gaggcattagataatgcctta

SEQ ID NO: 8599 - DNA, 21 bp, Homo sapiens
tcggcatttatggacttctaa

SEQ ID NO: 8600 - DNA, 21 bp, Homo sapiens
tccgttgatccagaaattata

SEQ ID NO: 8601 - DNA, 21 bp, Homo sapiens
cagaaatatattgaaagttta

SEQ ID NO: 8602 - DNA, 21 bp, Homo sapiens
ttgcttgtcctttaagataaa

SEQ ID NO: 8603 - DNA, 21 bp, Homo sapiens
ctggaattaattctacaataa

SEQ ID NO: 8604 - DNA, 21 bp, Homo sapiens
tcggattatcatatgatgaaa

SEQ ID NO: 8605 - DNA, 21 bp, Homo sapiens
acctccatcatcaatcctaaa

SEQ ID NO: 8606 - DNA, 21 bp, Homo sapiens
ccggctgattagagagctgca

SEQ ID NO: 8607 - DNA, 21 bp, Homo sapiens
cacggtccagaccattgtcaa

SEQ ID NO: 8608 - DNA, 21 bp, Homo sapiens
ctggagaatcagtaccggaaa

SEQ ID NO: 8609 - DNA, 21 bp, Homo sapiens
cccgagaacttctatgagatt

SEQ ID NO: 8610 - DNA, 21 bp, Homo sapiens
aaggagttcattcatctcaat

SEQ ID NO: 8611 - DNA, 21 bp, Homo sapiens
gaggagtgtagtttccttgta

SEQ ID NO: 8612 - DNA, 21 bp, Homo sapiens
gagaacttctatgagattcta

SEQ ID NO: 8613 - DNA, 21 bp, Homo sapiens
ccggttcaggacaaagtccaa

SEQ ID NO: 8614 - DNA, 21 bp, Homo sapiens
aaggatttgtataaagagtga

SEQ ID NO: 8615 - DNA, 21 bp, Homo sapiens
tagggttgtgtgattaatcat

SEQ ID NO: 8616 - DNA, 21 bp, Homo sapiens
caggaatgtagtaagccacaa

SEQ ID NO: 8617 - DNA, 21 bp, Homo sapiens
acgcaccaagccgaaagtaaa

SEQ ID NO: 8618 - DNA, 21 bp, Homo sapiens
tcgtcctaacataacactaaa

SEQ ID NO: 8619 - DNA, 21 bp, Homo sapiens
cagggtggtaaagctaaatga

SEQ ID NO: 8620 - DNA, 21 bp, Homo sapiens
aaacagttgtatcgtatgcaa

SEQ ID NO: 8621 - DNA, 21 bp, Homo sapiens
ctgatagaactctataatgca

SEQ ID NO: 8622 - DNA, 21 bp, Homo sapiens
cccacttggatttatagtata

SEQ ID NO: 8623 - DNA, 21 bp, Homo sapiens
ccggatgaagtcggaccacaa

SEQ ID NO: 8624 - DNA, 21 bp, Homo sapiens
accagtgggtatatgattgaa

SEQ ID NO: 8625 - DNA, 21 bp, Homo sapiens
cacctcatgtatcgtaagtta

SEQ ID NO: 8626 - DNA, 21 bp, Homo sapiens
taggaatggatcgatagttga

SEQ ID NO: 8627 - DNA, 21 bp, Homo sapiens
aacgtttgtattattctatta

SEQ ID NO: 8628 - DNA, 21 bp, Homo sapiens
tacagggttaataatccttaa

SEQ ID NO: 8629 - DNA, 21 bp, Homo sapiens
cacatgaaagattaatctgaa

SEQ ID NO: 8630 - DNA, 21 bp, Homo sapiens
cactctgtcattgttaatcta

SEQ ID NO: 8631 - DNA, 21 bp, Homo sapiens
cggcatgtttgtagcatacaa

SEQ ID NO: 8632 - DNA, 21 bp, Homo sapiens
cccggccggcttatgatttaa

SEQ ID NO: 8633 - DNA, 21 bp, Homo sapiens
aagggtttcatttacagttca

SEQ ID NO: 8634 - DNA, 21 bp, Homo sapiens
caggactatatacaactcaca

SEQ ID NO: 8635 - DNA, 21 bp, Homo sapiens
ctcgccttagtgaacatacaa

SEQ ID NO: 8636 - DNA, 21 bp, Homo sapiens
ttgctatttcttcaaatctta

SEQ ID NO: 8637 - DNA, 21 bp, Homo sapiens
aagggataaagtggaaatcat

SEQ ID NO: 8638 - DNA, 21 bp, Homo sapiens
atgcaagttagctaatacaaa

SEQ ID NO: 8639 - DNA, 21 bp, Homo sapiens
accggagaggatccatgagaa

SEQ ID NO: 8640 - DNA, 21 bp, Homo sapiens
accacggaagtcgagaattaa

SEQ ID NO: 8641 - DNA, 21 bp, Homo sapiens
caacgtgacctcctacctgaa

SEQ ID NO: 8642 - DNA, 21 bp, Homo sapiens
cagcttcagcagtctctacaa

SEQ ID NO: 8643 - DNA, 21 bp, Homo sapiens
ctgcagcagcgttcagaccaa

SEQ ID NO: 8644 - DNA, 21 bp, Homo sapiens
gacggaaattatgcgtaacaa

SEQ ID NO: 8645 - DNA, 21 bp, Homo sapiens
agcgagaagtgctgaagtcta

SEQ ID NO: 8646 - DNA, 21 bp, Homo sapiens
agccattaacctagtgattaa

SEQ ID NO: 8647 - DNA, 21 bp, Homo sapiens
taggattattccttgctatta

SEQ ID NO: 8648 - DNA, 21 bp, Homo sapiens
ctcgcggcagttcgaaatgaa

SEQ ID NO: 8649 - DNA, 21 bp, Homo sapiens
ttggaagaaatgagaaataca

SEQ ID NO: 8650 - DNA, 21 bp, Homo sapiens
cccactttattctgaggaata

SEQ ID NO: 8651 - DNA, 21 bp, Homo sapiens
cagtcttgttatccttgtcta

SEQ ID NO: 8652 - DNA, 21 bp, Homo sapiens
aagggatgaatctgaactata

SEQ ID NO: 8653 - DNA, 21 bp, Homo sapiens
caggtggagcaagttggcaaa

SEQ ID NO: 8654 - DNA, 21 bp, Homo sapiens
cagcagggagatcagccctaa

SEQ ID NO: 8655 - DNA, 21 bp, Homo sapiens
agccataacgttagactgcaa

SEQ ID NO: 8656 - DNA, 21 bp, Homo sapiens
ccgtgttcacttctaaactaa

SEQ ID NO: 8657 - DNA, 21 bp, Homo sapiens
aacgttagactgcaatactaa

SEQ ID NO: 8658 - DNA, 21 bp, Homo sapiens
cacggccgtgttcacttctaa

SEQ ID NO: 8659 - DNA, 21 bp, Homo sapiens
cccggtggctaaagagatcat

SEQ ID NO: 8660 - DNA, 21 bp, Homo sapiens
aaagagatcatctacacgtta

SEQ ID NO: 8661 - DNA, 21 bp, Homo sapiens
ccaggaggattacaacgacaa

SEQ ID NO: 8662 - DNA, 21 bp, Homo sapiens
cagcgtctggatcagcaacaa

SEQ ID NO: 8663 - DNA, 21 bp, Homo sapiens
atgcagggagttgtatatgaa

SEQ ID NO: 8664 - DNA, 21 bp, Homo sapiens
aaccctttgcataaagaacaa

SEQ ID NO: 8665 - DNA, 21 bp, Homo sapiens
tagactctcattcacaatgaa

SEQ ID NO: 8666 - DNA, 21 bp, Homo sapiens
cagtattactatacaatgtaa

SEQ ID NO: 8667 - DNA, 21 bp, Homo sapiens
ccgggaaactgaggaactaaa

SEQ ID NO: 8668 - DNA, 21 bp, Homo sapiens
aaggagctgtttcctgggtaa

SEQ ID NO: 8669 - DNA, 21 bp, Homo sapiens
cacgagtcctgagtcggttaa

SEQ ID NO: 8670 - DNA, 21 bp, Homo sapiens
cctgatgtcaaccaagtacaa

SEQ ID NO: 8671 - DNA, 21 bp, Homo sapiens
aggcttggtgtccgaatgcaa

SEQ ID NO: 8672 - DNA, 21 bp, Homo sapiens
gcggatggacacatactttga

SEQ ID NO: 8673 - DNA, 21 bp, Homo sapiens
cagaaagtgcattaaactgaa

SEQ ID NO: 8674 - DNA, 21 bp, Homo sapiens
atgaatgaattaggaaagaaa

SEQ ID NO: 8675 - DNA, 21 bp, Homo sapiens
tcggataatttgccctggaaa

SEQ ID NO: 8676 - DNA, 21 bp, Homo sapiens
cacctaaggactcaaatccaa

SEQ ID NO: 8677 - DNA, 21 bp, Homo sapiens
aagaaatatctccgaagttaa

SEQ ID NO: 8678 - DNA, 21 bp, Homo sapiens
cacactaatcttggaggaata

SEQ ID NO: 8679 - DNA, 21 bp, Homo sapiens
cggccttagctagaagtcgaa

SEQ ID NO: 8680 - DNA, 21 bp, Homo sapiens
gacccgcattataaacattat

SEQ ID NO: 8681 - DNA, 21 bp, Homo sapiens
ccgggctgtggagaaggataa

SEQ ID NO: 8682 - DNA, 21 bp, Homo sapiens
acccgcattataaacattata

SEQ ID NO: 8683 - DNA, 21 bp, Homo sapiens
ccaatattacctcaaggatta

SEQ ID NO: 8684 - DNA, 21 bp, Homo sapiens
caaagtccctttgcaagtcaa

SEQ ID NO: 8685 - DNA, 21 bp, Homo sapiens
cagagtggacgaagaattcca

SEQ ID NO: 8686 - DNA, 21 bp, Homo sapiens
gagcaatgctatggaatacaa

SEQ ID NO: 8687 - DNA, 21 bp, Homo sapiens
ctgctcggagatgttcttcaa

SEQ ID NO: 8688 - DNA, 21 bp, Homo sapiens
cacaagaacctactgaatcaa

SEQ ID NO: 8689 - DNA, 21 bp, Homo sapiens
cagcttgtccaggaatctaca

SEQ ID NO: 8690 - DNA, 21 bp, Homo sapiens
ctactacgcattatatattta

SEQ ID NO: 8691 - DNA, 21 bp, Homo sapiens
ctggccataagtgatttacta

SEQ ID NO: 8692 - DNA, 21 bp, Homo sapiens
ccgggaagactggccaaatca

SEQ ID NO: 8693 - DNA, 21 bp, Homo sapiens
aagggacaaactagtaggttt

SEQ ID NO: 8694 - DNA, 21 bp, Homo sapiens
aagcactgatgtaacttgcta

SEQ ID NO: 8695 - DNA, 21 bp, Homo sapiens
ctgatgtaacttgctaggtaa

SEQ ID NO: 8696 - DNA, 21 bp, Homo sapiens
caaattcggtttcatattcta

SEQ ID NO: 8697 - DNA, 21 bp, Homo sapiens
cacgaaggccttcattactta

SEQ ID NO: 8698 - DNA, 21 bp, Homo sapiens
ctggcctacagtggctacaaa

SEQ ID NO: 8699 - DNA, 21 bp, Homo sapiens
caggatgctctggatggacaa

SEQ ID NO: 8700 - DNA, 21 bp, Homo sapiens
aaccctttctttggaagcata

SEQ ID NO: 8701 - DNA, 21 bp, Homo sapiens
aaggagcagagttgcaaatta

SEQ ID NO: 8702 - DNA, 21 bp, Homo sapiens
ttgcgcggctttgaatccaaa

SEQ ID NO: 8703 - DNA, 21 bp, Homo sapiens
tactgttataataattattaa

SEQ ID NO: 8704 - DNA, 21 bp, Homo sapiens
caggaaaggaatagaggccaa

SEQ ID NO: 8705 - DNA, 21 bp, Homo sapiens
tggcaacaacaacaagattaa

SEQ ID NO: 8706 - DNA, 21 bp, Homo sapiens
cagcatcgccgagaaggttaa

SEQ ID NO: 8707 - DNA, 21 bp, Homo sapiens
tggcctaatcttaactaatta

SEQ ID NO: 8708 - DNA, 21 bp, Homo sapiens
aaggtttactctggttataaa

SEQ ID NO: 8709 - DNA, 21 bp, Homo sapiens
ccggcggtctacagaccttaa

SEQ ID NO: 8710 - DNA, 21 bp, Homo sapiens
acgcatgaggaagaaactgaa

SEQ ID NO: 8711 - DNA, 21 bp, Homo sapiens
cagaaacagcgagaacttcaa

SEQ ID NO: 8712 - DNA, 21 bp, Homo sapiens
tccggagagcagagtactcaa

SEQ ID NO: 8713 - DNA, 21 bp, Homo sapiens
gggcacccagctactcaacaa

SEQ ID NO: 8714 - DNA, 21 bp, Homo sapiens
gccgaaattcttgcagattgt

SEQ ID NO: 8715 - DNA, 21 bp, Homo sapiens
ctcggattgaaccttactaca

SEQ ID NO: 8716 - DNA, 21 bp, Homo sapiens
atgcattatcacaccactaat

SEQ ID NO: 8717 - DNA, 21 bp, Homo sapiens
ccagctcgtatcagccatcaa

SEQ ID NO: 8718 - DNA, 21 bp, Homo sapiens
atggactttattctaacttga

SEQ ID NO: 8719 - DNA, 21 bp, Homo sapiens
ccggcaccaatcgaccagata

SEQ ID NO: 8720 - DNA, 21 bp, Homo sapiens
gagcgagtgattggtggctta

SEQ ID NO: 8721 - DNA, 21 bp, Homo sapiens
catggtattggagaaacctta

SEQ ID NO: 8722 - DNA, 21 bp, Homo sapiens
atgatgaagtacgaatactta

SEQ ID NO: 8723 - DNA, 21 bp, Homo sapiens
ccgcacgctctatctcttcaa

SEQ ID NO: 8724 - DNA, 21 bp, Homo sapiens
tagcaagttcaaagctactta

SEQ ID NO: 8725 - DNA, 21 bp, Homo sapiens
ccactggttgccaaacactaa

SEQ ID NO: 8726 - DNA, 21 bp, Homo sapiens
cacgtgtatgaaggtggtcta

SEQ ID NO: 8727 - DNA, 21 bp, Homo sapiens
aaggaagaatgcagagtataa

SEQ ID NO: 8728 - DNA, 21 bp, Homo sapiens
cagagactattcagtaccaaa

SEQ ID NO: 8729 - DNA, 21 bp, Homo sapiens
cccagtgtatgtcaaacataa

SEQ ID NO: 8730 - DNA, 21 bp, Homo sapiens
cacaattaacctgcagtttaa

SEQ ID NO: 8731 - DNA, 21 bp, Homo sapiens
acccaccatgttcttgaacaa

SEQ ID NO: 8732 - DNA, 21 bp, Homo sapiens
aacaatcaggtttctaaataa

SEQ ID NO: 8733 - DNA, 21 bp, Homo sapiens
ttgtatatatacaatggataa

SEQ ID NO: 8734 - DNA, 21 bp, Homo sapiens
ttgccttgttgcaacatacaa

SEQ ID NO: 8735 - DNA, 21 bp, Homo sapiens
tacacttgtatgagcaaccaa

SEQ ID NO: 8736 - DNA, 21 bp, Homo sapiens
cagatttcagtatgtgtgtaa

SEQ ID NO: 8737 - DNA, 21 bp, Homo sapiens
aacggtgatattggagtgatt

SEQ ID NO: 8738 - DNA, 21 bp, Homo sapiens
acggtgatattggagtgatta

SEQ ID NO: 8739 - DNA, 21 bp, Homo sapiens
tcggcgaatgctgcttgcgaa

SEQ ID NO: 8740 - DNA, 21 bp, Homo sapiens
ccgtcggacttcgaatttcta

SEQ ID NO: 8741 - DNA, 21 bp, Homo sapiens
aacgcaggtcatacagcttaa

SEQ ID NO: 8742 - DNA, 21 bp, Homo sapiens
tcccaatatcttctagaataa

SEQ ID NO: 8743 - DNA, 21 bp, Homo sapiens
gaccttattaataggagcata

SEQ ID NO: 8744 - DNA, 21 bp, Homo sapiens
cagcaggtgcagctaaatcaa

SEQ ID NO: 8745 - DNA, 21 bp, Homo sapiens
aaggctgtagaaggaaatata

SEQ ID NO: 8746 - DNA, 21 bp, Homo sapiens
cagcgttatttaagcacataa

SEQ ID NO: 8747 - DNA, 21 bp, Homo sapiens
ctggaagattgttgtctccaa

SEQ ID NO: 8748 - DNA, 21 bp, Homo sapiens
caggttcagctggaatgtgaa

SEQ ID NO: 8749 - DNA, 21 bp, Homo sapiens
cagccacttgatataatccaa

SEQ ID NO: 8750 - DNA, 21 bp, Homo sapiens
ctgagagatgtctttaagaaa

SEQ ID NO: 8751 - DNA, 21 bp, Homo sapiens
ccaggagacgatgaagaacaa

SEQ ID NO: 8752 - DNA, 21 bp, Homo sapiens
acaggagatgctgtcacttaa

SEQ ID NO: 8753 - DNA, 21 bp, Homo sapiens
atgctgtcacttaataatcaa

SEQ ID NO: 8754 - DNA, 21 bp, Homo sapiens
cagctcctggccatatatcaa

SEQ ID NO: 8755 - DNA, 21 bp, Homo sapiens
cgggctgtggacagagattta

SEQ ID NO: 8756 - DNA, 21 bp, Homo sapiens
cagctactgttagctcataaa

SEQ ID NO: 8757 - DNA, 21 bp, Homo sapiens
atgacttgccattataattaa

SEQ ID NO: 8758 - DNA, 21 bp, Homo sapiens
atggttctctccgcaagtata

SEQ ID NO: 8759 - DNA, 21 bp, Homo sapiens
caggctgaggagtaccatcta

SEQ ID NO: 8760 - DNA, 21 bp, Homo sapiens
gaggctctggaggacaatcta

SEQ ID NO: 8761 - DNA, 21 bp, Homo sapiens
cgggcacattaggcagttgaa

SEQ ID NO: 8762 - DNA, 21 bp, Homo sapiens
cacacactgattcatactaat

SEQ ID NO: 8763 - DNA, 21 bp, Homo sapiens
caggattcacataaacattgt

SEQ ID NO: 8764 - DNA, 21 bp, Homo sapiens
aaggaatacgctgaatccata

SEQ ID NO: 8765 - DNA, 21 bp, Homo sapiens
cacccgtaacatcttcatcta

SEQ ID NO: 8766 - DNA, 21 bp, Homo sapiens
cgcagtggaggcgcacttcaa

SEQ ID NO: 8767 - DNA, 21 bp, Homo sapiens
ccggaagtttgtgctgacaga

SEQ ID NO: 8768 - DNA, 21 bp, Homo sapiens
gaggcgcacttcaagcataaa

SEQ ID NO: 8769 - DNA, 21 bp, Homo sapiens
atggcaagtctggataacgaa

SEQ ID NO: 8770 - DNA, 21 bp, Homo sapiens
cacagggttggtataatcata

SEQ ID NO: 8771 - DNA, 21 bp, Homo sapiens
cagcctgatgtcgtgcgtcaa

SEQ ID NO: 8772 - DNA, 21 bp, Homo sapiens
accgctcgttaacatatacaa

SEQ ID NO: 8773 - DNA, 21 bp, Homo sapiens
accgatgacaatgtgtaaata

SEQ ID NO: 8774 - DNA, 21 bp, Homo sapiens
aagtctgaatacttaatgaaa

SEQ ID NO: 8775 - DNA, 21 bp, Homo sapiens
aagcatatactagatagtcaa

SEQ ID NO: 8776 - DNA, 21 bp, Homo sapiens
caagcagatgctgaccttcta

SEQ ID NO: 8777 - DNA, 21 bp, Homo sapiens
cacggtgggccgagcacagaa

SEQ ID NO: 8778 - DNA, 21 bp, Homo sapiens
caggagtgaactggcatgcca

SEQ ID NO: 8779 - DNA, 21 bp, Homo sapiens
cacgccaaacctgagtttcta

SEQ ID NO: 8780 - DNA, 21 bp, Homo sapiens
cagaatgacagggtccagaaa

SEQ ID NO: 8781 - DNA, 21 bp, Homo sapiens
cacaaagagcagcttggcaaa

SEQ ID NO: 8782 - DNA, 21 bp, Homo sapiens
cagctcatacttgtactgtat

SEQ ID NO: 8783 - DNA, 21 bp, Homo sapiens
caggtgagcaatgcctaccta

SEQ ID NO: 8784 - DNA, 21 bp, Homo sapiens
caccagcttggtcattatgaa

SEQ ID NO: 8785 - DNA, 21 bp, Homo sapiens
tagctgttaagtaactataat

SEQ ID NO: 8786 - DNA, 21 bp, Homo sapiens
cccaggattatattagcatta

SEQ ID NO: 8787 - DNA, 21 bp, Homo sapiens
acccttattatttagctgtta

SEQ ID NO: 8788 - DNA, 21 bp, Homo sapiens
aagggaatgcatacattgcta

SEQ ID NO: 8789 - DNA, 21 bp, Homo sapiens
cagcaatatttccaacataaa

SEQ ID NO: 8790 - DNA, 21 bp, Homo sapiens
aacgaagtttggaaacagaaa

SEQ ID NO: 8791 - DNA, 21 bp, Homo sapiens
cacgatgaagaggcaaatcaa

SEQ ID NO: 8792 - DNA, 21 bp, Homo sapiens
cggaattataaatatatatta

SEQ ID NO: 8793 - DNA, 21 bp, Homo sapiens
cagcatcgagcagaagtacaa

SEQ ID NO: 8794 - DNA, 21 bp, Homo sapiens
caggtgcagagctacatggaa

SEQ ID NO: 8795 - DNA, 21 bp, Homo sapiens
atggtagtctttgaacagtaa

SEQ ID NO: 8796 - DNA, 21 bp, Homo sapiens
cacatattaaactatacctta

SEQ ID NO: 8797 - DNA, 21 bp, Homo sapiens
aacagttgtggccacactaaa

SEQ ID NO: 8798 - DNA, 21 bp, Homo sapiens
ctgcattgtagcaatttgtaa

SEQ ID NO: 8799 - DNA, 21 bp, Homo sapiens
cccaccgcagttgcactataa

SEQ ID NO: 8800 - DNA, 21 bp, Homo sapiens
aagcacctccttaccgggcaa

SEQ ID NO: 8801 - DNA, 21 bp, Homo sapiens
gtgcatagatttctatcttaa

SEQ ID NO: 8802 - DNA, 21 bp, Homo sapiens
gaggagaccattcaatttcaa

SEQ ID NO: 8803 - DNA, 21 bp, Homo sapiens
ccggaagctccaagaaatcaa

SEQ ID NO: 8804 - DNA, 21 bp, Homo sapiens
aggaatttagtcggcgtctta

SEQ ID NO: 8805 - DNA, 21 bp, Homo sapiens
caggatataccgtaacacgaa

SEQ ID NO: 8806 - DNA, 21 bp, Homo sapiens
atggaaggcactatttctcaa

SEQ ID NO: 8807 - DNA, 21 bp, Homo sapiens
tcagcctataatgaatggaaa

SEQ ID NO: 8808 - DNA, 21 bp, Homo sapiens
ctggaggaactcagatggaga

SEQ ID NO: 8809 - DNA, 21 bp, Homo sapiens
cagatggagaagtatccagta

SEQ ID NO: 8810 - DNA, 21 bp, Homo sapiens
aagactcagttcagaaagaaa

SEQ ID NO: 8811 - DNA, 21 bp, Homo sapiens
ctcagttgatgttcaccataa

SEQ ID NO: 8812 - DNA, 21 bp, Homo sapiens
atgacctcttgtcatagttaa

SEQ ID NO: 8813 - DNA, 21 bp, Homo sapiens
aaggaacgcgactaaacttaa

SEQ ID NO: 8814 - DNA, 21 bp, Homo sapiens
aagagatgctaaatataccaa

SEQ ID NO: 8815 - DNA, 21 bp, Homo sapiens
gccgatcaataaatcagagaa

SEQ ID NO: 8816 - DNA, 21 bp, Homo sapiens
cccaattcatttgctcacata

SEQ ID NO: 8817 - DNA, 21 bp, Homo sapiens
ctggttcagaaagacaggcaa

SEQ ID NO: 8818 - DNA, 21 bp, Homo sapiens
gtgccttatcgtaactctaaa

SEQ ID NO: 8819 - DNA, 21 bp, Homo sapiens
accaagaaagtcagcatgtaa

SEQ ID NO: 8820 - DNA, 21 bp, Homo sapiens
acggctgtaaagacagctgaa

SEQ ID NO: 8821 - DNA, 21 bp, Homo sapiens
caggatggccatcaaattcaa

SEQ ID NO: 8822 - DNA, 21 bp, Homo sapiens
cccaagaatactggccatatt

SEQ ID NO: 8823 - DNA, 21 bp, Homo sapiens
cacattctttctaaccatgga

SEQ ID NO: 8824 - DNA, 21 bp, Homo sapiens
atgcgcctggttattgagaaa

SEQ ID NO: 8825 - DNA, 21 bp, Homo sapiens
cagcaggaactttgcctcata

SEQ ID NO: 8826 - DNA, 21 bp, Homo sapiens
caggattgacaggccatccat

SEQ ID NO: 8827 - DNA, 21 bp, Homo sapiens
ctccgtcatggcagtgatgaa

SEQ ID NO: 8828 - DNA, 21 bp, Homo sapiens
cagatcttctttataactatt

SEQ ID NO: 8829 - DNA, 21 bp, Homo sapiens
gcccagcacagtgcaagcaaa

SEQ ID NO: 8830 - DNA, 21 bp, Homo sapiens
ctgggagagacgagccatgaa

SEQ ID NO: 8831 - DNA, 21 bp, Homo sapiens
gcgggatacttgtgaaatata

SEQ ID NO: 8832 - DNA, 21 bp, Homo sapiens
atcgggcactttgagaactaa

SEQ ID NO: 8833 - DNA, 21 bp, Homo sapiens
acgcattgtgatgaccagcaa

SEQ ID NO: 8834 - DNA, 21 bp, Homo sapiens
atgcaacaagttgaactccaa

SEQ ID NO: 8835 - DNA, 21 bp, Homo sapiens
tagctatgcttcagctgtata

SEQ ID NO: 8836 - DNA, 21 bp, Homo sapiens
tagcatcgaaactaggagaaa

SEQ ID NO: 8837 - DNA, 21 bp, Homo sapiens
gaggaacttcagtctataata

SEQ ID NO: 8838 - DNA, 21 bp, Homo sapiens
aaggcatattcaattggatta

SEQ ID NO: 8839 - DNA, 21 bp, Homo sapiens
atgctctttcattgaatataa

SEQ ID NO: 8840 - DNA, 21 bp, Homo sapiens
ctggtccttatcaggaaccaa

SEQ ID NO: 8841 - DNA, 21 bp, Homo sapiens
ctggatggctacatgaatata

SEQ ID NO: 8842 - DNA, 21 bp, Homo sapiens
ctgacatgtgagtaagataaa

SEQ ID NO: 8843 - DNA, 21 bp, Homo sapiens
caaattcatgttagtgaagta

SEQ ID NO: 8844 - DNA, 21 bp, Homo sapiens
atgaaactggtaccaatttaa

SEQ ID NO: 8845 - DNA, 21 bp, Homo sapiens
caggtactatttgtcacataa

SEQ ID NO: 8846 - DNA, 21 bp, Homo sapiens
aacatttgttctacaaattaa

SEQ ID NO: 8847 - DNA, 21 bp, Homo sapiens
ccggtttgtatgtacatagaa

SEQ ID NO: 8848 - DNA, 21 bp, Homo sapiens
ttgagcgaatatcaaagttaa

SEQ ID NO: 8849 - DNA, 21 bp, Homo sapiens
cactgagaaggctaagactaa

SEQ ID NO: 8850 - DNA, 21 bp, Homo sapiens
caccactacagagatatcata

SEQ ID NO: 8851 - DNA, 21 bp, Homo sapiens
cccgcagtgacggccagtaaa

SEQ ID NO: 8852 - DNA, 21 bp, Homo sapiens
ctcggtagctttgaatcttaa

SEQ ID NO: 8853 - DNA, 21 bp, Homo sapiens
cagctagaccagcttattgaa

SEQ ID NO: 8854 - DNA, 21 bp, Homo sapiens
aacgaggaagaccacaagtta

SEQ ID NO: 8855 - DNA, 21 bp, Homo sapiens
cacaagttagattgccagtta

SEQ ID NO: 8856 - DNA, 21 bp, Homo sapiens
aaccctcgtaacacaagtgaa

SEQ ID NO: 8857 - DNA, 21 bp, Homo sapiens
caggcctgagtcctacagcaa

SEQ ID NO: 8858 - DNA, 21 bp, Homo sapiens
ctcgcagaagtcagccatgta

SEQ ID NO: 8859 - DNA, 21 bp, Homo sapiens
cacgatgctggtgcatttatt

SEQ ID NO: 8860 - DNA, 21 bp, Homo sapiens
caccttctttgacgccaataa

SEQ ID NO: 8861 - DNA, 21 bp, Homo sapiens
aggaatttaagtcatccttca

SEQ ID NO: 8862 - DNA, 21 bp, Homo sapiens
aagctggaagcttccgatgaa

SEQ ID NO: 8863 - DNA, 21 bp, Homo sapiens
cacaaggcatcagttgttcaa

SEQ ID NO: 8864 - DNA, 21 bp, Homo sapiens
ccctgtcgaaatggaggtaaa

SEQ ID NO: 8865 - DNA, 21 bp, Homo sapiens
ttgcattggcttgaagcaata

SEQ ID NO: 8866 - DNA, 21 bp, Homo sapiens
aagcaatataatatattgtaa

SEQ ID NO: 8867 - DNA, 21 bp, Homo sapiens
caggtgtgcagccgtaggtta

SEQ ID NO: 8868 - DNA, 21 bp, Homo sapiens
acctcacatttgtgaactcaa

SEQ ID NO: 8869 - DNA, 21 bp, Homo sapiens
cccgattatggagcagttcaa

SEQ ID NO: 8870 - DNA, 21 bp, Homo sapiens
cagccgtaggttaaagaagaa

SEQ ID NO: 8871 - DNA, 21 bp, Homo sapiens
aaggttctcctgaaaggttaa

SEQ ID NO: 8872 - DNA, 21 bp, Homo sapiens
atggctcaggttaattctcaa

SEQ ID NO: 8873 - DNA, 21 bp, Homo sapiens
cagggcatggcaagaatatta

SEQ ID NO: 8874 - DNA, 21 bp, Homo sapiens
ccagatgaagacaagacttaa

SEQ ID NO: 8875 - DNA, 21 bp, Homo sapiens
ctggactatcagtcaaatcaa

SEQ ID NO: 8876 - DNA, 21 bp, Homo sapiens
gggctcgatttaattgttcaa

SEQ ID NO: 8877 - DNA, 21 bp, Homo sapiens
ccgaagatactacacacttta

SEQ ID NO: 8878 - DNA, 21 bp, Homo sapiens
cagggcagcttaagtggtcta

SEQ ID NO: 8879 - DNA, 21 bp, Homo sapiens
caggttcatagaccgaagata

SEQ ID NO: 8880 - DNA, 21 bp, Homo sapiens
atgagaatacaggctctctaa

SEQ ID NO: 8881 - DNA, 21 bp, Homo sapiens
gccgccgaaacagacagttaa

SEQ ID NO: 8882 - DNA, 21 bp, Homo sapiens
agggcataaatatatcattca

SEQ ID NO: 8883 - DNA, 21 bp, Homo sapiens
ccgccgaaacagacagttaaa

SEQ ID NO: 8884 - DNA, 21 bp, Homo sapiens
cacattaaatatatgagttaa

SEQ ID NO: 8885 - DNA, 21 bp, Homo sapiens
cgaggagaacctgaagaccaa

SEQ ID NO: 8886 - DNA, 21 bp, Homo sapiens
caggaaattctacaagggcaa

SEQ ID NO: 8887 - DNA, 21 bp, Homo sapiens
tgcagcaatggccaagatcaa

SEQ ID NO: 8888 - DNA, 21 bp, Homo sapiens
ccgtgttctcacagttattaa

SEQ ID NO: 8889 - DNA, 21 bp, Homo sapiens
cagcgtgatcattgtgttcca

SEQ ID NO: 8890 - DNA, 21 bp, Homo sapiens
caccttctatggtgccatcaa

SEQ ID NO: 8891 - DNA, 21 bp, Homo sapiens
cagatacgaaatggtgttaaa

SEQ ID NO: 8892 - DNA, 21 bp, Homo sapiens
aaggaacaaactttactacaa

SEQ ID NO: 8893 - DNA, 21 bp, Homo sapiens
cagcaagcgaatcaccatcaa

SEQ ID NO: 8894 - DNA, 21 bp, Homo sapiens
cagccttgactcatttggaaa

SEQ ID NO: 8895 - DNA, 21 bp, Homo sapiens
aaggatctgcacagtgttata

SEQ ID NO: 8896 - DNA, 21 bp, Homo sapiens
gaggaaatctctgacatcaaa

SEQ ID NO: 8897 - DNA, 21 bp, Homo sapiens
cagcgtccacttccaacacaa

SEQ ID NO: 8898 - DNA, 21 bp, Homo sapiens
cgacttctactccaacatcaa

SEQ ID NO: 8899 - DNA, 21 bp, Homo sapiens
aagactgaaactgaagctaaa

SEQ ID NO: 8900 - DNA, 21 bp, Homo sapiens
gaggatttaactaaactgaaa

SEQ ID NO: 8901 - DNA, 21 bp, Homo sapiens
ctcagtcagtctgccaaataa

SEQ ID NO: 8902 - DNA, 21 bp, Homo sapiens
ctgagatagaatacagaagta

SEQ ID NO: 8903 - DNA, 21 bp, Homo sapiens
caaggacatagtcttctacaa

SEQ ID NO: 8904 - DNA, 21 bp, Homo sapiens
tgcccttgtagtgaaacggaa

SEQ ID NO: 8905 - DNA, 21 bp, Homo sapiens
agggaatgtctgtaacatcaa

SEQ ID NO: 8906 - DNA, 21 bp, Homo sapiens
cagagtctaagtaaagacttt

SEQ ID NO: 8907 - DNA, 21 bp, Homo sapiens
caagctggtgatcttcaccaa

SEQ ID NO: 8908 - DNA, 21 bp, Homo sapiens
cgggaagtccacctttctcaa

SEQ ID NO: 8909 - DNA, 21 bp, Homo sapiens
cacgtgtgagacagccctgaa

SEQ ID NO: 8910 - DNA, 21 bp, Homo sapiens
cacgtgaacagggacacgcta

SEQ ID NO: 8911 - DNA, 21 bp, Homo sapiens
cagagctgtcaggaccatgaa

SEQ ID NO: 8912 - DNA, 21 bp, Homo sapiens
ccggaaggagctgaagagaat

SEQ ID NO: 8913 - DNA, 21 bp, Homo sapiens
tcccttgtccttacacataca

SEQ ID NO: 8914 - DNA, 21 bp, Homo sapiens
ctcaaaggtctccctcttcaa

SEQ ID NO: 8915 - DNA, 21 bp, Homo sapiens
cccatgatcatccgtaaagta

SEQ ID NO: 8916 - DNA, 21 bp, Homo sapiens
caggtccttcctggaatatta

SEQ ID NO: 8917 - DNA, 21 bp, Homo sapiens
cagactcctgatggcaaccaa

SEQ ID NO: 8918 - DNA, 21 bp, Homo sapiens
ctggtgctcaataaatatcta

SEQ ID NO: 8919 - DNA, 21 bp, Homo sapiens
cagcggcgacttcgtgcgcta

SEQ ID NO: 8920 - DNA, 21 bp, Homo sapiens
aagcttgcctacggaaatgaa

SEQ ID NO: 8921 - DNA, 21 bp, Homo sapiens
tcgagtcacaatcgcatgaaa

SEQ ID NO: 8922 - DNA, 21 bp, Homo sapiens
ctggtgtttgatgttgcatta

SEQ ID NO: 8923 - DNA, 21 bp, Homo sapiens
aaggcgttgactgggaacata

SEQ ID NO: 8924 - DNA, 21 bp, Homo sapiens
ccatagtactaaggaaataaa

SEQ ID NO: 8925 - DNA, 21 bp, Homo sapiens
tacgtcggccataaacagcta

SEQ ID NO: 8926 - DNA, 21 bp, Homo sapiens
aaccttatcgctcaacatgaa

SEQ ID NO: 8927 - DNA, 21 bp, Homo sapiens
tcgccacatcacagaatcgta

SEQ ID NO: 8928 - DNA, 21 bp, Homo sapiens
cagaatcgtatctatctcaca

SEQ ID NO: 8929 - DNA, 21 bp, Homo sapiens
cacagctgctgtagaagccaa

SEQ ID NO: 8930 - DNA, 21 bp, Homo sapiens
aacccaggaattctcaataaa

SEQ ID NO: 8931 - DNA, 21 bp, Homo sapiens
aaggctggtgccagtagttat

SEQ ID NO: 8932 - DNA, 21 bp, Homo sapiens
ccagtagttatgagtagccta

SEQ ID NO: 8933 - DNA, 21 bp, Homo sapiens
ccgcggctctatgttctatga

SEQ ID NO: 8934 - DNA, 21 bp, Homo sapiens
caagctgaggcgagtgcataa

SEQ ID NO: 8935 - DNA, 21 bp, Homo sapiens
ctggagcaacatctgaatgaa

SEQ ID NO: 8936 - DNA, 21 bp, Homo sapiens
cacgctcacttcaaacatcat

SEQ ID NO: 8937 - DNA, 21 bp, Homo sapiens
caggagatttctgaaagagaa

SEQ ID NO: 8938 - DNA, 21 bp, Homo sapiens
cagaatttgcagcaccatcaa

SEQ ID NO: 8939 - DNA, 21 bp, Homo sapiens
cccgatttgcctggttctgat

SEQ ID NO: 8940 - DNA, 21 bp, Homo sapiens
aagacagaggtcgacatttat

SEQ ID NO: 8941 - DNA, 21 bp, Homo sapiens
ctggacctaccttaatggtta

SEQ ID NO: 8942 - DNA, 21 bp, Homo sapiens
tcagagcttgatgctactgta

SEQ ID NO: 8943 - DNA, 21 bp, Homo sapiens
aaggaattctttgccaaggca

SEQ ID NO: 8944 - DNA, 21 bp, Homo sapiens
ccagatgaagctggacctaga

SEQ ID NO: 8945 - DNA, 21 bp, Homo sapiens
ttgggatggttgaatgctgta

SEQ ID NO: 8946 - DNA, 21 bp, Homo sapiens
aagacagagatcagtgtggaa

SEQ ID NO: 8947 - DNA, 21 bp, Homo sapiens
cccacagaaagtaaagtatca

SEQ ID NO: 8948 - DNA, 21 bp, Homo sapiens
ctggaatagagaagctcctaa

SEQ ID NO: 8949 - DNA, 21 bp, Homo sapiens
aaagcacatgtgatcaatata

SEQ ID NO: 8950 - DNA, 21 bp, Homo sapiens
cacgtataatgctgccaacaa

SEQ ID NO: 8951 - DNA, 21 bp, Homo sapiens
atggattacattagaaggcaa

SEQ ID NO: 8952 - DNA, 21 bp, Homo sapiens
aaggaggttcagggcatcaaa

SEQ ID NO: 8953 - DNA, 21 bp, Homo sapiens
agcgatttaaattgtattgaa

SEQ ID NO: 8954 - DNA, 21 bp, Homo sapiens
ttggctgtggatgaaattgta

SEQ ID NO: 8955 - DNA, 21 bp, Homo sapiens
caggaaagggacattgtaaat

SEQ ID NO: 8956 - DNA, 21 bp, Homo sapiens
aggcccgtgtatttaatgaaa

SEQ ID NO: 8957 - DNA, 21 bp, Homo sapiens
caccgactccactatgttgaa

SEQ ID NO: 8958 - DNA, 21 bp, Homo sapiens
ccgagccaccttctacctaaa

SEQ ID NO: 8959 - DNA, 21 bp, Homo sapiens
ctgggactccgtcaccatgaa

SEQ ID NO: 8960 - DNA, 21 bp, Homo sapiens
ctccgtcaccatgaagcacaa

SEQ ID NO: 8961 - DNA, 21 bp, Homo sapiens
cacggtcgtattcaagtgaaa

SEQ ID NO: 8962 - DNA, 21 bp, Homo sapiens
cagaatgatcctgaactttat

SEQ ID NO: 8963 - DNA, 21 bp, Homo sapiens
cagagggatattcactaataa

SEQ ID NO: 8964 - DNA, 21 bp, Homo sapiens
caggtgacgtttctatattta

SEQ ID NO: 8965 - DNA, 21 bp, Homo sapiens
ttggaagtatttaatatgcaa

SEQ ID NO: 8966 - DNA, 21 bp, Homo sapiens
ctcgttataaacactactaaa

SEQ ID NO: 8967 - DNA, 21 bp, Homo sapiens
ccgcctaatcatgtgtttata

SEQ ID NO: 8968 - DNA, 21 bp, Homo sapiens
ttggttctataaactagataa

SEQ ID NO: 8969 - DNA, 21 bp, Homo sapiens
gaggcggtttatagtcagaaa

SEQ ID NO: 8970 - DNA, 21 bp, Homo sapiens
cccatttaggtctgtactaaa

SEQ ID NO: 8971 - DNA, 21 bp, Homo sapiens
ctcctcggacctctcaacaaa

SEQ ID NO: 8972 - DNA, 21 bp, Homo sapiens
cccgagaagcttggaggctca

SEQ ID NO: 8973 - DNA, 21 bp, Homo sapiens
ccaggtggtaaacctgatgaa

SEQ ID NO: 8974 - DNA, 21 bp, Homo sapiens
aacgtgagtagcggtgatgta

SEQ ID NO: 8975 - DNA, 21 bp, Homo sapiens
aagcaatttcttaaagattat

SEQ ID NO: 8976 - DNA, 21 bp, Homo sapiens
caggagagaaatactttcata

SEQ ID NO: 8977 - DNA, 21 bp, Homo sapiens
agcgactattatatccagtta

SEQ ID NO: 8978 - DNA, 21 bp, Homo sapiens
acggctcttagctgcgttcaa

SEQ ID NO: 8979 - DNA, 21 bp, Homo sapiens
cagatcagactaagtatagta

SEQ ID NO: 8980 - DNA, 21 bp, Homo sapiens
cacctccgacttaaatgtgaa

SEQ ID NO: 8981 - DNA, 21 bp, Homo sapiens
ccgcctcaacacaatgcctta

SEQ ID NO: 8982 - DNA, 21 bp, Homo sapiens
cggaggtatattctaccatta

SEQ ID NO: 8983 - DNA, 21 bp, Homo sapiens
gaggaatattatgtgaatata

SEQ ID NO: 8984 - DNA, 21 bp, Homo sapiens
aagaaacatgactgtctcaaa

SEQ ID NO: 8985 - DNA, 21 bp, Homo sapiens
acggcagatcttccaaatcaa

SEQ ID NO: 8986 - DNA, 21 bp, Homo sapiens
cagtactattgtgacattaaa

SEQ ID NO: 8987 - DNA, 21 bp, Homo sapiens
cagacagtaactttggtgtaa

SEQ ID NO: 8988 - DNA, 21 bp, Homo sapiens
tccctacaacttggtactcta

SEQ ID NO: 8989 - DNA, 21 bp, Homo sapiens
ccggcacattcctttccttta

SEQ ID NO: 8990 - DNA, 21 bp, Homo sapiens
tccggtgtgcttgtgttctta

SEQ ID NO: 8991 - DNA, 21 bp, Homo sapiens
tcgcaatggagtcacacgcaa

SEQ ID NO: 8992 - DNA, 21 bp, Homo sapiens
cacagggtgatggaccatcaa

SEQ ID NO: 8993 - DNA, 21 bp, Homo sapiens
aaggacaaagttgaccacaca

SEQ ID NO: 8994 - DNA, 21 bp, Homo sapiens
ctggaagacgataccgcagaa

SEQ ID NO: 8995 - DNA, 21 bp, Homo sapiens
ttggtataagttcctaattaa

SEQ ID NO: 8996 - DNA, 21 bp, Homo sapiens
aacattgtaaataatcctata

SEQ ID NO: 8997 - DNA, 21 bp, Homo sapiens
cgggcagaccctggacatcaa

SEQ ID NO: 8998 - DNA, 21 bp, Homo sapiens
ctcagccaagatcaagttaaa

SEQ ID NO: 8999 - DNA, 21 bp, Homo sapiens
cacaacttacttagaaatgaa

SEQ ID NO: 9000 - DNA, 21 bp, Homo sapiens
tccctgtatataaatatataa

SEQ ID NO: 9001 - DNA, 21 bp, Homo sapiens
tcgagttagctacaaacataa

SEQ ID NO: 9002 - DNA, 21 bp, Homo sapiens
ccacatcttgatgctaagtaa

SEQ ID NO: 9003 - DNA, 21 bp, Homo sapiens
cacaagagacgtcataatcaa

SEQ ID NO: 9004 - DNA, 21 bp, Homo sapiens
cagcatgatggaccaactaaa

SEQ ID NO: 9005 - DNA, 21 bp, Homo sapiens
atgcgtggaaatattatgcta

SEQ ID NO: 9006 - DNA, 21 bp, Homo sapiens
acggtgtaaatacatctgata

SEQ ID NO: 9007 - DNA, 21 bp, Homo sapiens
aaggtttggctcatagagaaa

SEQ ID NO: 9008 - DNA, 21 bp, Homo sapiens
aaggaggtacgctgttaagta

SEQ ID NO: 9009 - DNA, 21 bp, Homo sapiens
aagcgagaatttgaaagatat

SEQ ID NO: 9010 - DNA, 21 bp, Homo sapiens
cagaccaaagcctgagtttaa

SEQ ID NO: 9011 - DNA, 21 bp, Homo sapiens
ctgggatttatacaagataaa

SEQ ID NO: 9012 - DNA, 21 bp, Homo sapiens
cagaaagatggtgtcaatcaa

SEQ ID NO: 9013 - DNA, 21 bp, Homo sapiens
cccggtagacctggaggtgaa

SEQ ID NO: 9014 - DNA, 21 bp, Homo sapiens
cacctgcttaattgacaccaa

SEQ ID NO: 9015 - DNA, 21 bp, Homo sapiens
cctgactgtaataatattaaa

SEQ ID NO: 9016 - DNA, 21 bp, Homo sapiens
ctggccgacgctcttcagcta

SEQ ID NO: 9017 - DNA, 21 bp, Homo sapiens
cacaggtctctccaaagtgaa

SEQ ID NO: 9018 - DNA, 21 bp, Homo sapiens
tcggatggtagaaatgcagaa

SEQ ID NO: 9019 - DNA, 21 bp, Homo sapiens
ctggatatgggacgaaagaaa

SEQ ID NO: 9020 - DNA, 21 bp, Homo sapiens
cccgatgaagaagctattaaa

SEQ ID NO: 9021 - DNA, 21 bp, Homo sapiens
cagtaaattactgtattgtaa

SEQ ID NO: 9022 - DNA, 21 bp, Homo sapiens
ccctgtgattgcagtaaatta

SEQ ID NO: 9023 - DNA, 21 bp, Homo sapiens
cacacttgtcagagacactaa

SEQ ID NO: 9024 - DNA, 21 bp, Homo sapiens
atgtactatcttaatgcttaa

SEQ ID NO: 9025 - DNA, 21 bp, Homo sapiens
gagctctgcggcacccggaaa

SEQ ID NO: 9026 - DNA, 21 bp, Homo sapiens
agagaggaacgggagagacta

SEQ ID NO: 9027 - DNA, 21 bp, Homo sapiens
cgcgccggagggaataggaaa

SEQ ID NO: 9028 - DNA, 21 bp, Homo sapiens
cactgttatcggccagatgaa

SEQ ID NO: 9029 - DNA, 21 bp, Homo sapiens
ccgcatttatgggaatgctga

SEQ ID NO: 9030 - DNA, 21 bp, Homo sapiens
ggccatttagatgattagtta

SEQ ID NO: 9031 - DNA, 21 bp, Homo sapiens
ctgggtagttctagaacttta

SEQ ID NO: 9032 - DNA, 21 bp, Homo sapiens
cagcaggaatttgaccctcta

SEQ ID NO: 9033 - DNA, 21 bp, Homo sapiens
ctgggcagagatgtacaggaa

SEQ ID NO: 9034 - DNA, 21 bp, Homo sapiens
aaggctcttctgtaacatctt

SEQ ID NO: 9035 - DNA, 21 bp, Homo sapiens
aactggaaggagcaccacttt

SEQ ID NO: 9036 - DNA, 21 bp, Homo sapiens
aagcgactgcagagtgaaaat

SEQ ID NO: 9037 - DNA, 21 bp, Homo sapiens
ctcaaggatatcagaagccaa

SEQ ID NO: 9038 - DNA, 21 bp, Homo sapiens
cagcatttgcggaattaacaa

SEQ ID NO: 9039 - DNA, 21 bp, Homo sapiens
ccggtcactgttgccaaacta

SEQ ID NO: 9040 - DNA, 21 bp, Homo sapiens
ccgcttcgagctgataaacat

SEQ ID NO: 9041 - DNA, 21 bp, Homo sapiens
caggctattctgagctcagaa

SEQ ID NO: 9042 - DNA, 21 bp, Homo sapiens
atggaggagggtgatctacaa

SEQ ID NO: 9043 - DNA, 21 bp, Homo sapiens
aaggcagtcagtggatcttaa

SEQ ID NO: 9044 - DNA, 21 bp, Homo sapiens
cacaacttccttaaagtcaaa

SEQ ID NO: 9045 - DNA, 21 bp, Homo sapiens
ccagatttagctggagattaa

SEQ ID NO: 9046 - DNA, 21 bp, Homo sapiens
ctgctcctaatttaacattaa

SEQ ID NO: 9047 - DNA, 21 bp, Homo sapiens
aagccagactgaatcaacaaa

SEQ ID NO: 9048 - DNA, 21 bp, Homo sapiens
agcgctatgtgtactgcataa

SEQ ID NO: 9049 - DNA, 21 bp, Homo sapiens
ctcactggagttcctatagta

SEQ ID NO: 9050 - DNA, 21 bp, Homo sapiens
acccatttcgttgctacccaa

SEQ ID NO: 9051 - DNA, 21 bp, Homo sapiens
cggcattaatactttaattta

SEQ ID NO: 9052 - DNA, 21 bp, Homo sapiens
aacatgaaacttcaaactaaa

SEQ ID NO: 9053 - DNA, 21 bp, Homo sapiens
ctgaaagacaagagcatttaa

SEQ ID NO: 9054 - DNA, 21 bp, Homo sapiens
accggtcatcgtacaaagaaa

SEQ ID NO: 9055 - DNA, 21 bp, Homo sapiens
cccggccacattaccctccaa

SEQ ID NO: 9056 - DNA, 21 bp, Homo sapiens
caaattgaagatggagatcaa

SEQ ID NO: 9057 - DNA, 21 bp, Homo sapiens
aagcaatgtttatattataaa

SEQ ID NO: 9058 - DNA, 21 bp, Homo sapiens
cacctgacaaatcctagcgaa

SEQ ID NO: 9059 - DNA, 21 bp, Homo sapiens
aagaattccttcgatgtttaa

SEQ ID NO: 9060 - DNA, 21 bp, Homo sapiens
aagaagatccgcaaaccataa

SEQ ID NO: 9061 - DNA, 21 bp, Homo sapiens
ctgcaagtagtggacactata

SEQ ID NO: 9062 - DNA, 21 bp, Homo sapiens
ccggttgttcatgttgatcca

SEQ ID NO: 9063 - DNA, 21 bp, Homo sapiens
aaggagggatatgtctctgaa

SEQ ID NO: 9064 - DNA, 21 bp, Homo sapiens
aacgagagatctccatataaa

SEQ ID NO: 9065 - DNA, 21 bp, Homo sapiens
ccggatttctgttatgggcaa

SEQ ID NO: 9066 - DNA, 21 bp, Homo sapiens
ccggagttctatgtacataga

SEQ ID NO: 9067 - DNA, 21 bp, Homo sapiens
acggaaatgtatacaaatcaa

SEQ ID NO: 9068 - DNA, 21 bp, Homo sapiens
caggactgagtcagaaatgaa

SEQ ID NO: 9069 - DNA, 21 bp, Homo sapiens
ccggaatattgctacatacta

SEQ ID NO: 9070 - DNA, 21 bp, Homo sapiens
atggcgttatttctaatttaa

SEQ ID NO: 9071 - DNA, 21 bp, Homo sapiens
ctggaatataagcgcaaacaa

SEQ ID NO: 9072 - DNA, 21 bp, Homo sapiens
aaggaccatattgatagaaca

SEQ ID NO: 9073 - DNA, 21 bp, Homo sapiens
atgcaaattaatagacatcaa

SEQ ID NO: 9074 - DNA, 21 bp, Homo sapiens
acgcattggtaccaaatttaa

SEQ ID NO: 9075 - DNA, 21 bp, Homo sapiens
ttcgtttgcatcacagtttaa

SEQ ID NO: 9076 - DNA, 21 bp, Homo sapiens
atgggtcaggttcgaagtcaa

SEQ ID NO: 9077 - DNA, 21 bp, Homo sapiens
caccatggtattacaggttca

SEQ ID NO: 9078 - DNA, 21 bp, Homo sapiens
atcgatgttgccagactacta

SEQ ID NO: 9079 - DNA, 21 bp, Homo sapiens
aagatctatatgttaagctaa

SEQ ID NO: 9080 - DNA, 21 bp, Homo sapiens
cagccaaactattatttgata

SEQ ID NO: 9081 - DNA, 21 bp, Homo sapiens
ccgcccaggatcaatcagaaa

SEQ ID NO: 9082 - DNA, 21 bp, Homo sapiens
aacgaatggtacaatctcaaa

SEQ ID NO: 9083 - DNA, 21 bp, Homo sapiens
ctggtatttatttggcattta

SEQ ID NO: 9084 - DNA, 21 bp, Homo sapiens
cacgggcaagagactccaata

SEQ ID NO: 9085 - DNA, 21 bp, Homo sapiens
ctggatcatattgtagataaa

SEQ ID NO: 9086 - DNA, 21 bp, Homo sapiens
aaggagataaatcaaaggaaa

SEQ ID NO: 9087 - DNA, 21 bp, Homo sapiens
cagatattaatgggagcatat

SEQ ID NO: 9088 - DNA, 21 bp, Homo sapiens
tcccagaagttcgattcacta

SEQ ID NO: 9089 - DNA, 21 bp, Homo sapiens
cccagaagttcgattcactaa

SEQ ID NO: 9090 - DNA, 21 bp, Homo sapiens
agcgggtagggcgataattta

SEQ ID NO: 9091 - DNA, 21 bp, Homo sapiens
aaggagcgtgcaatagaagaa

SEQ ID NO: 9092 - DNA, 21 bp, Homo sapiens
caggctttcatcagtgagatt

SEQ ID NO: 9093 - DNA, 21 bp, Homo sapiens
cagactaataaacatcaacta

SEQ ID NO: 9094 - DNA, 21 bp, Homo sapiens
aagggtggtcttcattggaaa

SEQ ID NO: 9095 - DNA, 21 bp, Homo sapiens
ctgaagttatatagccttgaa

SEQ ID NO: 9096 - DNA, 21 bp, Homo sapiens
aacgggctttaacatgtttaa

SEQ ID NO: 9097 - DNA, 21 bp, Homo sapiens
tagaagtaaattaaagttgta

SEQ ID NO: 9098 - DNA, 21 bp, Homo sapiens
caggaacttaacccaaatcta

SEQ ID NO: 9099 - DNA, 21 bp, Homo sapiens
aaggaagattatggaaaccaa

SEQ ID NO: 9100 - DNA, 21 bp, Homo sapiens
caggagaataagagatatgaa

SEQ ID NO: 9101 - DNA, 21 bp, Homo sapiens
cagcaagaagtataactgtaa

SEQ ID NO: 9102 - DNA, 21 bp, Homo sapiens
cagagagaaatgcttagtcaa

SEQ ID NO: 9103 - DNA, 21 bp, Homo sapiens
ctggcatatagtaatacccaa

SEQ ID NO: 9104 - DNA, 21 bp, Homo sapiens
aagaagcgctatagaaatgaa

SEQ ID NO: 9105 - DNA, 21 bp, Homo sapiens
ctggtggttaagggtagcaaa

SEQ ID NO: 9106 - DNA, 21 bp, Homo sapiens
caggatcgggattacaggcaa

SEQ ID NO: 9107 - DNA, 21 bp, Homo sapiens
ctgctattaaatccacattaa

SEQ ID NO: 9108 - DNA, 21 bp, Homo sapiens
agcggtgttggcgactaacaa

SEQ ID NO: 9109 - DNA, 21 bp, Homo sapiens
cacattgtatttgttaatgta

SEQ ID NO: 9110 - DNA, 21 bp, Homo sapiens
cagggagtttctgctcaccaa

SEQ ID NO: 9111 - DNA, 21 bp, Homo sapiens
aaggcgtatttggaagtttaa

SEQ ID NO: 9112 - DNA, 21 bp, Homo sapiens
ctggagctatttcacagtata

SEQ ID NO: 9113 - DNA, 21 bp, Homo sapiens
atcctaggtaattaaaccata

SEQ ID NO: 9114 - DNA, 21 bp, Homo sapiens
ctgggtaaactatctttgtaa

SEQ ID NO: 9115 - DNA, 21 bp, Homo sapiens
tggctgggtatctcagtttaa

SEQ ID NO: 9116 - DNA, 21 bp, Homo sapiens
cagtcaatagccagaccttaa

SEQ ID NO: 9117 - DNA, 21 bp, Homo sapiens
cagggatttcctgtaaggaat

SEQ ID NO: 9118 - DNA, 21 bp, Homo sapiens
ccgggtgtaaggtccctttaa

SEQ ID NO: 9119 - DNA, 21 bp, Homo sapiens
cagccgcactgcacaagtgta

SEQ ID NO: 9120 - DNA, 21 bp, Homo sapiens
catgacagtcatggtctataa

SEQ ID NO: 9121 - DNA, 21 bp, Homo sapiens
cacgagtaccgggtcaagata

SEQ ID NO: 9122 - DNA, 21 bp, Homo sapiens
cacgctctgcaaggttctcaa

SEQ ID NO: 9123 - DNA, 21 bp, Homo sapiens
aacgtggtcatcaaagttaaa

SEQ ID NO: 9124 - DNA, 21 bp, Homo sapiens
cagcgacttcctcaaaggcta

SEQ ID NO: 9125 - DNA, 21 bp, Homo sapiens
ccgggtgaggctggagtgcaa

SEQ ID NO: 9126 - DNA, 21 bp, Homo sapiens
acgatcagatctgtcctgcga

SEQ ID NO: 9127 - DNA, 21 bp, Homo sapiens
caggaagtttgcagagagtaa

SEQ ID NO: 9128 - DNA, 21 bp, Homo sapiens
caagttctatgtgcacatcaa

SEQ ID NO: 9129 - DNA, 21 bp, Homo sapiens
ctgcaagataatgtaactgaa

SEQ ID NO: 9130 - DNA, 21 bp, Homo sapiens
ctgaatggatgtggaaatgaa

SEQ ID NO: 9131 - DNA, 21 bp, Homo sapiens
ctggagtcctggctcaataaa

SEQ ID NO: 9132 - DNA, 21 bp, Homo sapiens
aaggaataaatccaagagctt

SEQ ID NO: 9133 - DNA, 21 bp, Homo sapiens
cacgttagaggaagttaacaa

SEQ ID NO: 9134 - DNA, 21 bp, Homo sapiens
cagggtgtctgagaaagtgaa

SEQ ID NO: 9135 - DNA, 21 bp, Homo sapiens
ctgcgtcagtttaaatttcaa

SEQ ID NO: 9136 - DNA, 21 bp, Homo sapiens
ctgacaggaattataagtaaa

SEQ ID NO: 9137 - DNA, 21 bp, Homo sapiens
cacctcgtgcgcggccatcaa

SEQ ID NO: 9138 - DNA, 21 bp, Homo sapiens
cacgaaatactcctacaagta

SEQ ID NO: 9139 - DNA, 21 bp, Homo sapiens
cacgccaactgtagccaggta

SEQ ID NO: 9140 - DNA, 21 bp, Homo sapiens
taggaacaatggtcacttgta

SEQ ID NO: 9141 - DNA, 21 bp, Homo sapiens
cggccacatcttcaaggtcta

SEQ ID NO: 9142 - DNA, 21 bp, Homo sapiens
acccagaaccttcaccagcaa

SEQ ID NO: 9143 - DNA, 21 bp, Homo sapiens
cggcaatttaagaaagatata

SEQ ID NO: 9144 - DNA, 21 bp, Homo sapiens
caccctcaaatcacctactaa

SEQ ID NO: 9145 - DNA, 21 bp, Homo sapiens
caggcagatgaggaaatcaaa

SEQ ID NO: 9146 - DNA, 21 bp, Homo sapiens
ctgaaattcgttggtgttata

SEQ ID NO: 9147 - DNA, 21 bp, Homo sapiens
tcgaaaggttatagaaataaa

SEQ ID NO: 9148 - DNA, 21 bp, Homo sapiens
ccagccaaatttcaacactaa

SEQ ID NO: 9149 - DNA, 21 bp, Homo sapiens
cagaataagtttggacagttt

SEQ ID NO: 9150 - DNA, 21 bp, Homo sapiens
caggatcgagatatgaagcga

SEQ ID NO: 9151 - DNA, 21 bp, Homo sapiens
ctcaccgagatgattcatgaa

SEQ ID NO: 9152 - DNA, 21 bp, Homo sapiens
tcgagaaatggtagaaatcat

SEQ ID NO: 9153 - DNA, 21 bp, Homo sapiens
agcatggatttgattatgcaa

SEQ ID NO: 9154 - DNA, 21 bp, Homo sapiens
aagaggcaaatttctacgtaa

SEQ ID NO: 9155 - DNA, 21 bp, Homo sapiens
tccgtcgaatttgaaggtgaa

SEQ ID NO: 9156 - DNA, 21 bp, Homo sapiens
ctggtgtttgcgtacagttaa

SEQ ID NO: 9157 - DNA, 21 bp, Homo sapiens
ctcgggagagacggaatacaa

SEQ ID NO: 9158 - DNA, 21 bp, Homo sapiens
cacacagaatgtatacttcta

SEQ ID NO: 9159 - DNA, 21 bp, Homo sapiens
tagaagattcttagtacttaa

SEQ ID NO: 9160 - DNA, 21 bp, Homo sapiens
ccgggaggatttccattataa

SEQ ID NO: 9161 - DNA, 21 bp, Homo sapiens
cgggtatgtcctggtgaatta

SEQ ID NO: 9162 - DNA, 21 bp, Homo sapiens
atctaccgagaagtacaaata

SEQ ID NO: 9163 - DNA, 21 bp, Homo sapiens
ccgaaggatgttggtcctaga

SEQ ID NO: 9164 - DNA, 21 bp, Homo sapiens
aagggcaagattatttgctta

SEQ ID NO: 9165 - DNA, 21 bp, Homo sapiens
aagcgagttgaaactgcttta

SEQ ID NO: 9166 - DNA, 21 bp, Homo sapiens
cacactaccaagtataatgaa

SEQ ID NO: 9167 - DNA, 21 bp, Homo sapiens
cagagatgatccggtcatata

SEQ ID NO: 9168 - DNA, 21 bp, Homo sapiens
tcgagattacatggatgttaa

SEQ ID NO: 9169 - DNA, 21 bp, Homo sapiens
ccgatttgtcactgcaatcaa

SEQ ID NO: 9170 - DNA, 21 bp, Homo sapiens
accattgagaagaacattcaa

SEQ ID NO: 9171 - DNA, 21 bp, Homo sapiens
caggatgagtatggaccttaa

SEQ ID NO: 9172 - DNA, 21 bp, Homo sapiens
aagaaagaagatattaaacta

SEQ ID NO: 9173 - DNA, 21 bp, Homo sapiens
tccgaggttcctcaaagttaa

SEQ ID NO: 9174 - DNA, 21 bp, Homo sapiens
ccagctcttcacaaactttaa

SEQ ID NO: 9175 - DNA, 21 bp, Homo sapiens
cagcccgaccttcaagaagaa

SEQ ID NO: 9176 - DNA, 21 bp, Homo sapiens
ccgagaaagggccatattcaa

SEQ ID NO: 9177 - DNA, 21 bp, Homo sapiens
aagggccatattcaaggtgca

SEQ ID NO: 9178 - DNA, 21 bp, Homo sapiens
ctcggccaagcacatcttcaa

SEQ ID NO: 9179 - DNA, 21 bp, Homo sapiens
caggataaggttacacttgta

SEQ ID NO: 9180 - DNA, 21 bp, Homo sapiens
cagccatttagtcctaatata

SEQ ID NO: 9181 - DNA, 21 bp, Homo sapiens
caagcgtacaatgacaggtta

SEQ ID NO: 9182 - DNA, 21 bp, Homo sapiens
aagtatgggagtaaagctaaa

SEQ ID NO: 9183 - DNA, 21 bp, Homo sapiens
caggaactataggtgtatcaa

SEQ ID NO: 9184 - DNA, 21 bp, Homo sapiens
aagctaaacattgcatatcaa

SEQ ID NO: 9185 - DNA, 21 bp, Homo sapiens
aaggttattcttaatcctgta

SEQ ID NO: 9186 - DNA, 21 bp, Homo sapiens
acgggaagcattagcaagaat

SEQ ID NO: 9187 - DNA, 21 bp, Homo sapiens
cccactaatgtcttaacctaa

SEQ ID NO: 9188 - DNA, 21 bp, Homo sapiens
atgtcttaacctaaaccataa

SEQ ID NO: 9189 - DNA, 21 bp, Homo sapiens
atggatccaattacacgtcaa

SEQ ID NO: 9190 - DNA, 21 bp, Homo sapiens
ccagatttattactaccataa

SEQ ID NO: 9191 - DNA, 21 bp, Homo sapiens
cagaacaatactctaatagaa

SEQ ID NO: 9192 - DNA, 21 bp, Homo sapiens
caggtaaatgctacagatgaa

SEQ ID NO: 9193 - DNA, 21 bp, Homo sapiens
cacattaaagttaataattga

SEQ ID NO: 9194 - DNA, 21 bp, Homo sapiens
cagctatgtgaataagattaa

SEQ ID NO: 9195 - DNA, 21 bp, Homo sapiens
ctcgccctttgtaataaccta

SEQ ID NO: 9196 - DNA, 21 bp, Homo sapiens
aagaatgtacctgcactcaaa

SEQ ID NO: 9197 - DNA, 21 bp, Homo sapiens
caccctggttgtcacgacgaa

SEQ ID NO: 9198 - DNA, 21 bp, Homo sapiens
ctggatgcctatttagaaata

SEQ ID NO: 9199 - DNA, 21 bp, Homo sapiens
cagagtcgccttagtccagaa

SEQ ID NO: 9200 - DNA, 21 bp, Homo sapiens
ttggctcaccttggtaacaaa

SEQ ID NO: 9201 - DNA, 21 bp, Homo sapiens
aacattctcataaacatttaa

SEQ ID NO: 9202 - DNA, 21 bp, Homo sapiens
agggaggaactcaaccatcaa

SEQ ID NO: 9203 - DNA, 21 bp, Homo sapiens
gtccaatatcagaactattaa

SEQ ID NO: 9204 - DNA, 21 bp, Homo sapiens
ccggacgttctttattcactt

SEQ ID NO: 9205 - DNA, 21 bp, Homo sapiens
cacgggtttctctatgaaaca

SEQ ID NO: 9206 - DNA, 21 bp, Homo sapiens
cgggctttctttggaagatga

SEQ ID NO: 9207 - DNA, 21 bp, Homo sapiens
aaggtgaatttcataaatgta

SEQ ID NO: 9208 - DNA, 21 bp, Homo sapiens
ctgagtttatacagaaattta

SEQ ID NO: 9209 - DNA, 21 bp, Homo sapiens
caggattagaaacacacttaa

SEQ ID NO: 9210 - DNA, 21 bp, Homo sapiens
aagcgtaatgttacactttaa

SEQ ID NO: 9211 - DNA, 21 bp, Homo sapiens
aaggatcttaacagtcaatta

SEQ ID NO: 9212 - DNA, 21 bp, Homo sapiens
cagggataaagtaattcctaa

SEQ ID NO: 9213 - DNA, 21 bp, Homo sapiens
aggaccaattatctcagtcta

SEQ ID NO: 9214 - DNA, 21 bp, Homo sapiens
cccgttcgtctcaatgttaaa

SEQ ID NO: 9215 - DNA, 21 bp, Homo sapiens
ctgcgtgaaggtgaaagtcaa

SEQ ID NO: 9216 - DNA, 21 bp, Homo sapiens
cagcagggttatgcccttaaa

SEQ ID NO: 9217 - DNA, 21 bp, Homo sapiens
caggctgaagtgattcattca

SEQ ID NO: 9218 - DNA, 21 bp, Homo sapiens
cacctaatccacagaaagtaa

SEQ ID NO: 9219 - DNA, 21 bp, Homo sapiens
aagggtagtactacaaatgat

SEQ ID NO: 9220 - DNA, 21 bp, Homo sapiens
aagggaagaagaaatgtcaaa

SEQ ID NO: 9221 - DNA, 21 bp, Homo sapiens
ctggcagtttattgctcttaa

SEQ ID NO: 9222 - DNA, 21 bp, Homo sapiens
ccgcatcattcagaacataaa

SEQ ID NO: 9223 - DNA, 21 bp, Homo sapiens
cccgaatggctgagccctgaa

SEQ ID NO: 9224 - DNA, 21 bp, Homo sapiens
cagtgccaggatccaagtaaa

SEQ ID NO: 9225 - DNA, 21 bp, Homo sapiens
aaggtttaatgtcagggtcaa

SEQ ID NO: 9226 - DNA, 21 bp, Homo sapiens
tcagattgggattaacataaa

SEQ ID NO: 9227 - DNA, 21 bp, Homo sapiens
aggcaggaacttgaagagaaa

SEQ ID NO: 9228 - DNA, 21 bp, Homo sapiens
ccctgctttaataaacagcaa

SEQ ID NO: 9229 - DNA, 21 bp, Homo sapiens
cggcgaaaccacctacaagaa

SEQ ID NO: 9230 - DNA, 21 bp, Homo sapiens
gacggcgagagcgacacataa

SEQ ID NO: 9231 - DNA, 21 bp, Homo sapiens
cggcaagacctatttataata

SEQ ID NO: 9232 - DNA, 21 bp, Homo sapiens
ccgcgtcgtggtcatgaacaa

SEQ ID NO: 9233 - DNA, 21 bp, Homo sapiens
aaggttgatgctgtaagatta

SEQ ID NO: 9234 - DNA, 21 bp, Homo sapiens
atgggagacattcacaccaaa

SEQ ID NO: 9235 - DNA, 21 bp, Homo sapiens
caagatcacatgtgacttata

SEQ ID NO: 9236 - DNA, 21 bp, Homo sapiens
cccgccttctgcggccctcaa

SEQ ID NO: 9237 - DNA, 21 bp, Homo sapiens
cagcgatagctccaaggccaa

SEQ ID NO: 9238 - DNA, 21 bp, Homo sapiens
ctagatggtttgcctattaaa

SEQ ID NO: 9239 - DNA, 21 bp, Homo sapiens
ctggtaaagttggaagaataa

SEQ ID NO: 9240 - DNA, 21 bp, Homo sapiens
ctccattcctatatcctttaa

SEQ ID NO: 9241 - DNA, 21 bp, Homo sapiens
caagcgatgtttgatattgaa

SEQ ID NO: 9242 - DNA, 21 bp, Homo sapiens
ttgggtcttccctcaaagtaa

SEQ ID NO: 9243 - DNA, 21 bp, Homo sapiens
caggattattgtatttacgtt

SEQ ID NO: 9244 - DNA, 21 bp, Homo sapiens
atagctgttctttatgcataa

SEQ ID NO: 9245 - DNA, 21 bp, Homo sapiens
ctgcgtggctaggatgattaa

SEQ ID NO: 9246 - DNA, 21 bp, Homo sapiens
cccgggctggttggtcttgaa

SEQ ID NO: 9247 - DNA, 21 bp, Homo sapiens
gcggaataaacccaatggtta

SEQ ID NO: 9248 - DNA, 21 bp, Homo sapiens
cggaataaacccaatggttaa

SEQ ID NO: 9249 - DNA, 21 bp, Homo sapiens
ccggcgggagcaggtggtaaa

SEQ ID NO: 9250 - DNA, 21 bp, Homo sapiens
agggtagtagatggcattgaa

SEQ ID NO: 9251 - DNA, 21 bp, Homo sapiens
ccgtaccacattcgtgtccaa

SEQ ID NO: 9252 - DNA, 21 bp, Homo sapiens
caaggacatcagcgaaaccaa

SEQ ID NO: 9253 - DNA, 21 bp, Homo sapiens
cccgggttcctgaacctagaa

SEQ ID NO: 9254 - DNA, 21 bp, Homo sapiens
caaggtgtgtgtagtaagtta

SEQ ID NO: 9255 - DNA, 21 bp, Homo sapiens
aagttggataataggctttaa

SEQ ID NO: 9256 - DNA, 21 bp, Homo sapiens
taggctttaaatgatcaggga

SEQ ID NO: 9257 - DNA, 21 bp, Homo sapiens
ctcccaatatatttacacgaa

SEQ ID NO: 9258 - DNA, 21 bp, Homo sapiens
tggtgagaaattgtaaacaaa

SEQ ID NO: 9259 - DNA, 21 bp, Homo sapiens
caggcggttgaggaacatatt

SEQ ID NO: 9260 - DNA, 21 bp, Homo sapiens
cccgaattctgtctgcttaaa

SEQ ID NO: 9261 - DNA, 21 bp, Homo sapiens
aagactcacgaagatattgaa

SEQ ID NO: 9262 - DNA, 21 bp, Homo sapiens
caggttattatgaccaggaaa

SEQ ID NO: 9263 - DNA, 21 bp, Homo sapiens
accctgcttctggaactatta

SEQ ID NO: 9264 - DNA, 21 bp, Homo sapiens
cccagtgtggctgagatccaa

SEQ ID NO: 9265 - DNA, 21 bp, Homo sapiens
ctaggtattattaagaatgaa

SEQ ID NO: 9266 - DNA, 21 bp, Homo sapiens
tagaccctaagaagtaattaa

SEQ ID NO: 9267 - DNA, 21 bp, Homo sapiens
ctccctagcctcctaagcaaa

SEQ ID NO: 9268 - DNA, 21 bp, Homo sapiens
ttgagagaacccggtcaataa

SEQ ID NO: 9269 - DNA, 21 bp, Homo sapiens
ctgcgtgaccacggccatcta

SEQ ID NO: 9270 - DNA, 21 bp, Homo sapiens
cccggtcaataaagtgtacta

SEQ ID NO: 9271 - DNA, 21 bp, Homo sapiens
cagaaatatgacttatttcta

SEQ ID NO: 9272 - DNA, 21 bp, Homo sapiens
cagagtgtaagtaaaggataa

SEQ ID NO: 9273 - DNA, 21 bp, Homo sapiens
cagggagaagtcagaaagtaa

SEQ ID NO: 9274 - DNA, 21 bp, Homo sapiens
gccgatgacatcaaatctaaa

SEQ ID NO: 9275 - DNA, 21 bp, Homo sapiens
ccggaacaattgtgtgcttta

SEQ ID NO: 9276 - DNA, 21 bp, Homo sapiens
ctggcattatactgaactata

SEQ ID NO: 9277 - DNA, 21 bp, Homo sapiens
atggtgtgaatggaacattaa

SEQ ID NO: 9278 - DNA, 21 bp, Homo sapiens
cagggtaacatggaaatacta

SEQ ID NO: 9279 - DNA, 21 bp, Homo sapiens
tccctggagctccctaaataa

SEQ ID NO: 9280 - DNA, 21 bp, Homo sapiens
cagctgtgaggagtttgtcaa

SEQ ID NO: 9281 - DNA, 21 bp, Homo sapiens
cagcaataggatttgctataa

SEQ ID NO: 9282 - DNA, 21 bp, Homo sapiens
ctaaattaaagtaatttcaaa

SEQ ID NO: 9283 - DNA, 21 bp, Homo sapiens
tcccaatgttatgcagacata

SEQ ID NO: 9284 - DNA, 21 bp, Homo sapiens
cacagtcatctttgcaactat

SEQ ID NO: 9285 - DNA, 21 bp, Homo sapiens
cagagacttgctgaaggatta

SEQ ID NO: 9286 - DNA, 21 bp, Homo sapiens
cagacggttggcatacgttat

SEQ ID NO: 9287 - DNA, 21 bp, Homo sapiens
ctgtaggtcgtcatcacctaa

SEQ ID NO: 9288 - DNA, 21 bp, Homo sapiens
cagcggagtggagaagttgaa

SEQ ID NO: 9289 - DNA, 21 bp, Homo sapiens
aaaggagcaaggcaagttcta

SEQ ID NO: 9290 - DNA, 21 bp, Homo sapiens
aaccctaagcaatgtgcatac

SEQ ID NO: 9291 - DNA, 21 bp, Homo sapiens
ttggatatagtcaacatataa

SEQ ID NO: 9292 - DNA, 21 bp, Homo sapiens
cccaattaatatacagccaaa

SEQ ID NO: 9293 - DNA, 21 bp, Homo sapiens
aagcatattggatttatttaa

SEQ ID NO: 9294 - DNA, 21 bp, Homo sapiens
cagatcaacctcaataatgaa

SEQ ID NO: 9295 - DNA, 21 bp, Homo sapiens
aacaatgttattcggctgaaa

SEQ ID NO: 9296 - DNA, 21 bp, Homo sapiens
aacaacctcattgctgttcta

SEQ ID NO: 9297 - DNA, 21 bp, Homo sapiens
ctgggaggcaacgatctggaa

SEQ ID NO: 9298 - DNA, 21 bp, Homo sapiens
caggatgaagtcattggaaca

SEQ ID NO: 9299 - DNA, 21 bp, Homo sapiens
cccacttggtacagaaatgaa

SEQ ID NO: 9300 - DNA, 21 bp, Homo sapiens
ctgggtcatctccagaaacaa

SEQ ID NO: 9301 - DNA, 21 bp, Homo sapiens
cgccatttggaaataccttta

SEQ ID NO: 9302 - DNA, 21 bp, Homo sapiens
acggactttatgcggcattta

SEQ ID NO: 9303 - DNA, 21 bp, Homo sapiens
aaccatttatgtatttctcta

SEQ ID NO: 9304 - DNA, 21 bp, Homo sapiens
aaccactaatatgtatgtaaa

SEQ ID NO: 9305 - DNA, 21 bp, Homo sapiens
aaggaaggtgcctgtgatgaa

SEQ ID NO: 9306 - DNA, 21 bp, Homo sapiens
caggatgtgcatgcatcttga

SEQ ID NO: 9307 - DNA, 21 bp, Homo sapiens
caggatctataaactcttcaa

SEQ ID NO: 9308 - DNA, 21 bp, Homo sapiens
taggatcctttctagaaggaa

SEQ ID NO: 9309 - DNA, 21 bp, Homo sapiens
atcgcagatcaaagtggacaa

SEQ ID NO: 9310 - DNA, 21 bp, Homo sapiens
accggtgctgctgcaactcta

SEQ ID NO: 9311 - DNA, 21 bp, Homo sapiens
taagaagatggtcacaccata

SEQ ID NO: 9312 - DNA, 21 bp, Homo sapiens
tccgtttggtttatggagaaa

SEQ ID NO: 9313 - DNA, 21 bp, Homo sapiens
acggctgctttgaaaggttta

SEQ ID NO: 9314 - DNA, 21 bp, Homo sapiens
aacggtataaagagagatcaa

SEQ ID NO: 9315 - DNA, 21 bp, Homo sapiens
caggaagatactattggtgta

SEQ ID NO: 9316 - DNA, 21 bp, Homo sapiens
ccgctttatgttaaagatctt

SEQ ID NO: 9317 - DNA, 21 bp, Homo sapiens
cacgagggtgatgaaggccta

SEQ ID NO: 9318 - DNA, 21 bp, Homo sapiens
caagtacttcatgaccaggaa

SEQ ID NO: 9319 - DNA, 21 bp, Homo sapiens
gagctgaagctggattattaa

SEQ ID NO: 9320 - DNA, 21 bp, Homo sapiens
aagtggattgtcactcagaaa

SEQ ID NO: 9321 - DNA, 21 bp, Homo sapiens
ctgccaggaattcataaccaa

SEQ ID NO: 9322 - DNA, 21 bp, Homo sapiens
cacggccaaggtgaagcgcaa

SEQ ID NO: 9323 - DNA, 21 bp, Homo sapiens
ctgggagggatccgacagaaa

SEQ ID NO: 9324 - DNA, 21 bp, Homo sapiens
ctccgtgtacactatcaataa

SEQ ID NO: 9325 - DNA, 21 bp, Homo sapiens
tccgtgtacactatcaataaa

SEQ ID NO: 9326 - DNA, 21 bp, Homo sapiens
atggatctccgtgtacactat

SEQ ID NO: 9327 - DNA, 21 bp, Homo sapiens
aacaagtttaatataaagtga

SEQ ID NO: 9328 - DNA, 21 bp, Homo sapiens
acggccgtgtcctacctgaaa

SEQ ID NO: 9329 - DNA, 21 bp, Homo sapiens
cgggtacaggctgaacgacta

SEQ ID NO: 9330 - DNA, 21 bp, Homo sapiens
cacggccgtgtcctacctgaa

SEQ ID NO: 9331 - DNA, 21 bp, Homo sapiens
cagggagtaagttactgctaa

SEQ ID NO: 9332 - DNA, 21 bp, Homo sapiens
agggagtaagttactgctaaa

SEQ ID NO: 9333 - DNA, 21 bp, Homo sapiens
ctggatctggccaaagctcaa

SEQ ID NO: 9334 - DNA, 21 bp, Homo sapiens
taggatagtataggaagtaga

SEQ ID NO: 9335 - DNA, 21 bp, Homo sapiens
atgggccagactacaacttaa

SEQ ID NO: 9336 - DNA, 21 bp, Homo sapiens
gggcctcatgaaggtctttaa

SEQ ID NO: 9337 - DNA, 21 bp, Homo sapiens
cgcaaagaacttaaagctgaa

SEQ ID NO: 9338 - DNA, 21 bp, Homo sapiens
acgcaaagaacttaaagctga

SEQ ID NO: 9339 - DNA, 21 bp, Homo sapiens
ctgcctggtcaggttccagaa

SEQ ID NO: 9340 - DNA, 21 bp, Homo sapiens
cagcaccgtgacgaccaccaa

SEQ ID NO: 9341 - DNA, 21 bp, Homo sapiens
cccaccagatttctacaccaa

SEQ ID NO: 9342 - DNA, 21 bp, Homo sapiens
atccaactggttctaagtcaa

SEQ ID NO: 9343 - DNA, 21 bp, Homo sapiens
aaggataatactgaactgtaa

SEQ ID NO: 9344 - DNA, 21 bp, Homo sapiens
caggaatgtgaagaaattcta

SEQ ID NO: 9345 - DNA, 21 bp, Homo sapiens
caccatctgaagagcattaaa

SEQ ID NO: 9346 - DNA, 21 bp, Homo sapiens
ctgcacatctctgatgtggaa

SEQ ID NO: 9347 - DNA, 21 bp, Homo sapiens
ctggcacgaattggaaataca

SEQ ID NO: 9348 - DNA, 21 bp, Homo sapiens
cagagtgatggtgtgcaacaa

SEQ ID NO: 9349 - DNA, 21 bp, Homo sapiens
acgccggtggacaaccagcaa

SEQ ID NO: 9350 - DNA, 21 bp, Homo sapiens
aacccttggtaccacagaata

SEQ ID NO: 9351 - DNA, 21 bp, Homo sapiens
ctggttaaagagacccggaaa

SEQ ID NO: 9352 - DNA, 21 bp, Homo sapiens
cggaatttgttgctccagaaa

SEQ ID NO: 9353 - DNA, 21 bp, Homo sapiens
ttgacgcaaatagcgaaagta

SEQ ID NO: 9354 - DNA, 21 bp, Homo sapiens
atcgacacgttccgatcacaa

SEQ ID NO: 9355 - DNA, 21 bp, Homo sapiens
caccattgaacagttatccta

SEQ ID NO: 9356 - DNA, 21 bp, Homo sapiens
agcgaacttgtcatagattta

SEQ ID NO: 9357 - DNA, 21 bp, Homo sapiens
ccctggagacatcaacttcaa

SEQ ID NO: 9358 - DNA, 21 bp, Homo sapiens
cagcccagtctctttgagtaa

SEQ ID NO: 9359 - DNA, 21 bp, Homo sapiens
cagcttcgtgtggttccacta

SEQ ID NO: 9360 - DNA, 21 bp, Homo sapiens
cagagccatcgtggtcatgta

SEQ ID NO: 9361 - DNA, 21 bp, Homo sapiens
tcgtatggaagaagaccttta

SEQ ID NO: 9362 - DNA, 21 bp, Homo sapiens
ccggacctgaatgtaatgcaa

SEQ ID NO: 9363 - DNA, 21 bp, Homo sapiens
cagaccatccctgccaacaaa

SEQ ID NO: 9364 - DNA, 21 bp, Homo sapiens
caagatctgtgctgagagcaa

SEQ ID NO: 9365 - DNA, 21 bp, Homo sapiens
ctgggaggccgtgagtatcta

SEQ ID NO: 9366 - DNA, 21 bp, Homo sapiens
cagccgaaagtgagactccta

SEQ ID NO: 9367 - DNA, 21 bp, Homo sapiens
taccttctacgatacaactaa

SEQ ID NO: 9368 - DNA, 21 bp, Homo sapiens
acaactaatgttaacgcataa

SEQ ID NO: 9369 - DNA, 21 bp, Homo sapiens
tacatatattatctacatcaa

SEQ ID NO: 9370 - DNA, 21 bp, Homo sapiens
cagagtgtacttacctaacaa

SEQ ID NO: 9371 - DNA, 21 bp, Homo sapiens
gtgggtgagactaagaatata

SEQ ID NO: 9372 - DNA, 21 bp, Homo sapiens
ttgcatgaagtcaggcataaa

SEQ ID NO: 9373 - DNA, 21 bp, Homo sapiens
aagcaggatcctcgtatacca

SEQ ID NO: 9374 - DNA, 21 bp, Homo sapiens
cgggatctctccttaggataa

SEQ ID NO: 9375 - DNA, 21 bp, Homo sapiens
caggtacttattattggccat

SEQ ID NO: 9376 - DNA, 21 bp, Homo sapiens
acgcttggattgagttattta

SEQ ID NO: 9377 - DNA, 21 bp, Homo sapiens
ctgggtggattacatatgata

SEQ ID NO: 9378 - DNA, 21 bp, Homo sapiens
aaccattctcttacagtttaa

SEQ ID NO: 9379 - DNA, 21 bp, Homo sapiens
ctggagagcctgatcaacaaa

SEQ ID NO: 9380 - DNA, 21 bp, Homo sapiens
ccgcgaggtggagaaggtgaa

SEQ ID NO: 9381 - DNA, 21 bp, Homo sapiens
cggctttgccttgaatttaaa

SEQ ID NO: 9382 - DNA, 21 bp, Homo sapiens
accggctttgccttgaattta

SEQ ID NO: 9383 - DNA, 21 bp, Homo sapiens
caggatcagccgaggatgaaa

SEQ ID NO: 9384 - DNA, 21 bp, Homo sapiens
gtgggtttatataaggaataa

SEQ ID NO: 9385 - DNA, 21 bp, Homo sapiens
tgggtttatataaggaataaa

SEQ ID NO: 9386 - DNA, 21 bp, Homo sapiens
ccagttgttgatcttatgcaa

SEQ ID NO: 9387 - DNA, 21 bp, Homo sapiens
ctccatgtacctgacacccaa

SEQ ID NO: 9388 - DNA, 21 bp, Homo sapiens
ccggccattctacgtcaacaa

SEQ ID NO: 9389 - DNA, 21 bp, Homo sapiens
aagaatttgatgagccagcta

SEQ ID NO: 9390 - DNA, 21 bp, Homo sapiens
ctatatttaattggaaggtaa

SEQ ID NO: 9391 - DNA, 21 bp, Homo sapiens
tccttctgttattatacttaa

SEQ ID NO: 9392 - DNA, 21 bp, Homo sapiens
ctgggtttaaagtttacttca

SEQ ID NO: 9393 - DNA, 21 bp, Homo sapiens
ccgagatgttgctgaaatgta

SEQ ID NO: 9394 - DNA, 21 bp, Homo sapiens
catggtatgatcgaaatgtaa

SEQ ID NO: 9395 - DNA, 21 bp, Homo sapiens
ccacagcgagaccctagttaa

SEQ ID NO: 9396 - DNA, 21 bp, Homo sapiens
accaactaacttacatgctta

SEQ ID NO: 9397 - DNA, 21 bp, Homo sapiens
acgagggtctattaccgagaa

SEQ ID NO: 9398 - DNA, 21 bp, Homo sapiens
cagcaaaggcctcaagtctta

SEQ ID NO: 9399 - DNA, 21 bp, Homo sapiens
ctccaagttaagtctccctaa

SEQ ID NO: 9400 - DNA, 21 bp, Homo sapiens
atgatttggactccaagttaa

SEQ ID NO: 9401 - DNA, 21 bp, Homo sapiens
caggcgggaaactgaataata

SEQ ID NO: 9402 - DNA, 21 bp, Homo sapiens
ctgagcctatttctagtataa

SEQ ID NO: 9403 - DNA, 21 bp, Homo sapiens
cgggagagtgttaccattgaa

SEQ ID NO: 9404 - DNA, 21 bp, Homo sapiens
cacgatatgtcagtactgcaa

SEQ ID NO: 9405 - DNA, 21 bp, Homo sapiens
ctcggagaacatccatcagaa

SEQ ID NO: 9406 - DNA, 21 bp, Homo sapiens
tcggagaacatccatcagaat

SEQ ID NO: 9407 - DNA, 21 bp, Homo sapiens
cccagcccatttgcacactaa

SEQ ID NO: 9408 - DNA, 21 bp, Homo sapiens
ccagcccatttgcacactaaa

SEQ ID NO: 9409 - DNA, 21 bp, Homo sapiens
aacaaagtaaatgaaatttaa

SEQ ID NO: 9410 - DNA, 21 bp, Homo sapiens
caggataaagactgatgttta

SEQ ID NO: 9411 - DNA, 21 bp, Homo sapiens
ttccttctgcctacaaataaa

SEQ ID NO: 9412 - DNA, 21 bp, Homo sapiens
cagcttcgtgacgcacaccaa

SEQ ID NO: 9413 - DNA, 21 bp, Homo sapiens
caggtttgagtttctgtccaa

SEQ ID NO: 9414 - DNA, 21 bp, Homo sapiens
caggaaggtctggatcatcta

SEQ ID NO: 9415 - DNA, 21 bp, Homo sapiens
cggcacctacgtagtctgcta

SEQ ID NO: 9416 - DNA, 21 bp, Homo sapiens
cagcggtctggttatcgtcta

SEQ ID NO: 9417 - DNA, 21 bp, Homo sapiens
ctcctacgacctcgccatcaa

SEQ ID NO: 9418 - DNA, 21 bp, Homo sapiens
ctgccaggaactgaccaccta

SEQ ID NO: 9419 - DNA, 21 bp, Homo sapiens
aagacaacatcaaggctctct

SEQ ID NO: 9420 - DNA, 21 bp, Homo sapiens
aatcccatggaagtggctgtt

SEQ ID NO: 9421 - DNA, 21 bp, Homo sapiens
caggcatttcgggaatgtaca

SEQ ID NO: 9422 - DNA, 21 bp, Homo sapiens
ctggatggtccctgtctataa

SEQ ID NO: 9423 - DNA, 21 bp, Homo sapiens
ttgggcttatagagccagtta

SEQ ID NO: 9424 - DNA, 21 bp, Homo sapiens
ccgtgtctttccagccctaaa

SEQ ID NO: 9425 - DNA, 21 bp, Homo sapiens
cagcagctgctttgtcaccaa

SEQ ID NO: 9426 - DNA, 21 bp, Homo sapiens
ctgcgggaaatctcacatcta

SEQ ID NO: 9427 - DNA, 21 bp, Homo sapiens
ctgctggagacacaatatcaa

SEQ ID NO: 9428 - DNA, 21 bp, Homo sapiens
ccgcctgtcacgggtgctgaa

SEQ ID NO: 9429 - DNA, 21 bp, Homo sapiens
cagcagagttactgtactcaa

SEQ ID NO: 9430 - DNA, 21 bp, Homo sapiens
ctggattaatttatggcaata

SEQ ID NO: 9431 - DNA, 21 bp, Homo sapiens
cggctgaaagtggacatctta

SEQ ID NO: 9432 - DNA, 21 bp, Homo sapiens
ctggaagagagtatcatataa

SEQ ID NO: 9433 - DNA, 21 bp, Homo sapiens
ctgggagtgtgtatatatgta

SEQ ID NO: 9434 - DNA, 21 bp, Homo sapiens
aaggaggatttccgcagggaa

SEQ ID NO: 9435 - DNA, 21 bp, Homo sapiens
ctggtccattagattccgaaa

SEQ ID NO: 9436 - DNA, 21 bp, Homo sapiens
caccgctttatcgccagctaa

SEQ ID NO: 9437 - DNA, 21 bp, Homo sapiens
ttgcttcatcgtaaacctaaa

SEQ ID NO: 9438 - DNA, 21 bp, Homo sapiens
tagagcttgtttgatgttaaa

SEQ ID NO: 9439 - DNA, 21 bp, Homo sapiens
cacgaacttcgacctactgaa

SEQ ID NO: 9440 - DNA, 21 bp, Homo sapiens
caaaggcagatcagtaagcaa

SEQ ID NO: 9441 - DNA, 21 bp, Homo sapiens
ctggatcaaattaagaatata

SEQ ID NO: 9442 - DNA, 21 bp, Homo sapiens
acccaagaaattataaataaa

SEQ ID NO: 9443 - DNA, 21 bp, Homo sapiens
ccgatttacaattacattgaa

SEQ ID NO: 9444 - DNA, 21 bp, Homo sapiens
caggatgaacaaccaagtgat

SEQ ID NO: 9445 - DNA, 21 bp, Homo sapiens
gacaatactgtcagagttcaa

SEQ ID NO: 9446 - DNA, 21 bp, Homo sapiens
cacagattggaaagaactgta

SEQ ID NO: 9447 - DNA, 21 bp, Homo sapiens
aagccaggtgatcaccattaa

SEQ ID NO: 9448 - DNA, 21 bp, Homo sapiens
cagcgtgtgaccctcacacta

SEQ ID NO: 9449 - DNA, 21 bp, Homo sapiens
acggatctgctcagaaaggaa

SEQ ID NO: 9450 - DNA, 21 bp, Homo sapiens
cgacaactggatgaacattaa

SEQ ID NO: 9451 - DNA, 21 bp, Homo sapiens
aacgaggatgagatcaagaaa

SEQ ID NO: 9452 - DNA, 21 bp, Homo sapiens
ccggaagatggccttgaagta

SEQ ID NO: 9453 - DNA, 21 bp, Homo sapiens
atggtggtacaggatggcata

SEQ ID NO: 9454 - DNA, 21 bp, Homo sapiens
cagccaggaggcggagtggaa

SEQ ID NO: 9455 - DNA, 21 bp, Homo sapiens
ctgagtgttaatgatgccttt

SEQ ID NO: 9456 - DNA, 21 bp, Homo sapiens
cacctgcagcctggcacccaa

SEQ ID NO: 9457 - DNA, 21 bp, Homo sapiens
cccggacaatatacaccacga

SEQ ID NO: 9458 - DNA, 21 bp, Homo sapiens
caggatggacctgactttcaa

SEQ ID NO: 9459 - DNA, 21 bp, Homo sapiens
cgggaaggtggtgatggccaa

SEQ ID NO: 9460 - DNA, 21 bp, Homo sapiens
cccaaactagtgagagtaata

SEQ ID NO: 9461 - DNA, 21 bp, Homo sapiens
aagcagatgcttaatagtaaa

SEQ ID NO: 9462 - DNA, 21 bp, Homo sapiens
ccggaggtttatgaatgataa

SEQ ID NO: 9463 - DNA, 21 bp, Homo sapiens
aacgatgacgatgaagatgtt

SEQ ID NO: 9464 - DNA, 21 bp, Homo sapiens
aacgagagctgacccagttaa

SEQ ID NO: 9465 - DNA, 21 bp, Homo sapiens
cagggatgttctgtgtaataa

SEQ ID NO: 9466 - DNA, 21 bp, Homo sapiens
caggagctaattggcttatat

SEQ ID NO: 9467 - DNA, 21 bp, Homo sapiens
ctggaattatttgcctgttaa

SEQ ID NO: 9468 - DNA, 21 bp, Homo sapiens
acggtttgtttcagtctccaa

SEQ ID NO: 9469 - DNA, 21 bp, Homo sapiens
cagcatcaatgtgattagtaa

SEQ ID NO: 9470 - DNA, 21 bp, Homo sapiens
aacactgataataggaagtaa

SEQ ID NO: 9471 - DNA, 21 bp, Homo sapiens
atgagatattctacacattaa

SEQ ID NO: 9472 - DNA, 21 bp, Homo sapiens
aagaaagtcactcatgagtaa

SEQ ID NO: 9473 - DNA, 21 bp, Homo sapiens
ccggcagggcctgcaatgcaa

SEQ ID NO: 9474 - DNA, 21 bp, Homo sapiens
cagcggcaccttccctttcaa

SEQ ID NO: 9475 - DNA, 21 bp, Homo sapiens
ttgggtggttcattacagcaa

SEQ ID NO: 9476 - DNA, 21 bp, Homo sapiens
cacgaccaacagatactataa

SEQ ID NO: 9477 - DNA, 21 bp, Homo sapiens
cgggaggagctgagcaacgta

SEQ ID NO: 9478 - DNA, 21 bp, Homo sapiens
aaagaacagcttgacaggaaa

SEQ ID NO: 9479 - DNA, 21 bp, Homo sapiens
gccctcaaatttatcaagaaa

SEQ ID NO: 9480 - DNA, 21 bp, Homo sapiens
ctgccctctccctgaaataaa

SEQ ID NO: 9481 - DNA, 21 bp, Homo sapiens
aagctaaagcacacaaataaa

SEQ ID NO: 9482 - DNA, 21 bp, Homo sapiens
cagggtttatttggtcaagat

SEQ ID NO: 9483 - DNA, 21 bp, Homo sapiens
ccgggctcacacacaaatgat

SEQ ID NO: 9484 - DNA, 21 bp, Homo sapiens
tagaaattgattgcacattga

SEQ ID NO: 9485 - DNA, 21 bp, Homo sapiens
ctccagtgactcaaccctgaa

SEQ ID NO: 9486 - DNA, 21 bp, Homo sapiens
ccgggaatgtgtccactcgta

SEQ ID NO: 9487 - DNA, 21 bp, Homo sapiens
caggctgctgttcgagaatga

SEQ ID NO: 9488 - DNA, 21 bp, Homo sapiens
tcgagaatgagtattcctata

SEQ ID NO: 9489 - DNA, 21 bp, Homo sapiens
ttgtataatattgcaaatgta

SEQ ID NO: 9490 - DNA, 21 bp, Homo sapiens
gcggatttacgtaaccaacta

SEQ ID NO: 9491 - DNA, 21 bp, Homo sapiens
atggtcatatttcctgagtaa

SEQ ID NO: 9492 - DNA, 21 bp, Homo sapiens
aaggaaatggctgaagaatat

SEQ ID NO: 9493 - DNA, 21 bp, Homo sapiens
caggctgaagattcaagtata

SEQ ID NO: 9494 - DNA, 21 bp, Homo sapiens
cagggtcttgccagaaagtaa

SEQ ID NO: 9495 - DNA, 21 bp, Homo sapiens
aagaggatgtatcaacattaa

SEQ ID NO: 9496 - DNA, 21 bp, Homo sapiens
caggagagaaacattgcttta

SEQ ID NO: 9497 - DNA, 21 bp, Homo sapiens
caggacagtcatcctctataa

SEQ ID NO: 9498 - DNA, 21 bp, Homo sapiens
ttcgggagctacagaaattaa

SEQ ID NO: 9499 - DNA, 21 bp, Homo sapiens
aaggatggtaacaaactagaa

SEQ ID NO: 9500 - DNA, 21 bp, Homo sapiens
caaggttgaggtgaagattaa

SEQ ID NO: 9501 - DNA, 21 bp, Homo sapiens
cacgaacatgcagttattgaa

SEQ ID NO: 9502 - DNA, 21 bp, Homo sapiens
ctggatatgtactaacgaata

SEQ ID NO: 9503 - DNA, 21 bp, Homo sapiens
tagcagtacaatgattagtaa

SEQ ID NO: 9504 - DNA, 21 bp, Homo sapiens
cagggaagttagtcaaatgaa

SEQ ID NO: 9505 - DNA, 21 bp, Homo sapiens
agacatgagatccatcactaa

SEQ ID NO: 9506 - DNA, 21 bp, Homo sapiens
ctggctgtaatcactaccatt

SEQ ID NO: 9507 - DNA, 21 bp, Homo sapiens
ctgcgttcttgtgacagatta

SEQ ID NO: 9508 - DNA, 21 bp, Homo sapiens
acagtagtaccaaatgcttta

SEQ ID NO: 9509 - DNA, 21 bp, Homo sapiens
tcgatttatgagaaagatgta

SEQ ID NO: 9510 - DNA, 21 bp, Homo sapiens
taggttcatatctacattgta

SEQ ID NO: 9511 - DNA, 21 bp, Homo sapiens
cagccttacagtgcaacataa

SEQ ID NO: 9512 - DNA, 21 bp, Homo sapiens
ctaggcataatattagctaaa

SEQ ID NO: 9513 - DNA, 21 bp, Homo sapiens
cagaggatatatgctgataaa

SEQ ID NO: 9514 - DNA, 21 bp, Homo sapiens
cagatccgcagacatcctaca

SEQ ID NO: 9515 - DNA, 21 bp, Homo sapiens
gagcgtgtaagcaagcgtcta

SEQ ID NO: 9516 - DNA, 21 bp, Homo sapiens
ctggtcactcgagcacatcta

SEQ ID NO: 9517 - DNA, 21 bp, Homo sapiens
accgggaaattgagaagtata

SEQ ID NO: 9518 - DNA, 21 bp, Homo sapiens
aaggtaattatcagcattgta

SEQ ID NO: 9519 - DNA, 21 bp, Homo sapiens
caggttcattaaagaaggcaa

SEQ ID NO: 9520 - DNA, 21 bp, Homo sapiens
aagctgattggaaacaattaa

SEQ ID NO: 9521 - DNA, 21 bp, Homo sapiens
aagattgtcatcaacaccata

SEQ ID NO: 9522 - DNA, 21 bp, Homo sapiens
cagaagttgtagcttatacaa

SEQ ID NO: 9523 - DNA, 21 bp, Homo sapiens
agcgctgattgttacaatgaa

SEQ ID NO: 9524 - DNA, 21 bp, Homo sapiens
ctggcttaatttaaacagtta

SEQ ID NO: 9525 - DNA, 21 bp, Homo sapiens
ccggctgaaactgctttctta

SEQ ID NO: 9526 - DNA, 21 bp, Homo sapiens
aagaaagagcatttagtataa

SEQ ID NO: 9527 - DNA, 21 bp, Homo sapiens
cgggaacattacaaacaagaa

SEQ ID NO: 9528 - DNA, 21 bp, Homo sapiens
tagcttctccatcacattcaa

SEQ ID NO: 9529 - DNA, 21 bp, Homo sapiens
gaggatgaagttgattgacta

SEQ ID NO: 9530 - DNA, 21 bp, Homo sapiens
ccgagatggaacagtatgaaa

SEQ ID NO: 9531 - DNA, 21 bp, Homo sapiens
ttgcatttgttgagactttaa

SEQ ID NO: 9532 - DNA, 21 bp, Homo sapiens
cagatgttatgtcacctgaaa

SEQ ID NO: 9533 - DNA, 21 bp, Homo sapiens
caagagcataatgtacattaa

SEQ ID NO: 9534 - DNA, 21 bp, Homo sapiens
taggagcttaggaaacaagaa

SEQ ID NO: 9535 - DNA, 21 bp, Homo sapiens
caggatgtacatcaccaccaa

SEQ ID NO: 9536 - DNA, 21 bp, Homo sapiens
cagccgtacatcgataatgaa

SEQ ID NO: 9537 - DNA, 21 bp, Homo sapiens
cccaaggactttcatgattat

SEQ ID NO: 9538 - DNA, 21 bp, Homo sapiens
cagggcattattctagaaaca

SEQ ID NO: 9539 - DNA, 21 bp, Homo sapiens
aaacctgttcttagactccaa

SEQ ID NO: 9540 - DNA, 21 bp, Homo sapiens
ctcagtgaagcgaaacagtaa

SEQ ID NO: 9541 - DNA, 21 bp, Homo sapiens
caggtagtaaacacgatctta

SEQ ID NO: 9542 - DNA, 21 bp, Homo sapiens
cacctaggcttcagccttaaa

SEQ ID NO: 9543 - DNA, 21 bp, Homo sapiens
aagcatggtgttagtctgtat

SEQ ID NO: 9544 - DNA, 21 bp, Homo sapiens
gaggatttaaattatcctaaa

SEQ ID NO: 9545 - DNA, 21 bp, Homo sapiens
tagaagagtcattacaccata

SEQ ID NO: 9546 - DNA, 21 bp, Homo sapiens
cagattgaggagcatgccata

SEQ ID NO: 9547 - DNA, 21 bp, Homo sapiens
cagcctgatgggaacactaaa

SEQ ID NO: 9548 - DNA, 21 bp, Homo sapiens
taggaatttacctgaatataa

SEQ ID NO: 9549 - DNA, 21 bp, Homo sapiens
aaggaggatagctgaagccaa

SEQ ID NO: 9550 - DNA, 21 bp, Homo sapiens
cagcaacatctggtaagagaa

SEQ ID NO: 9551 - DNA, 21 bp, Homo sapiens
tacagagaatcctaatgataa

SEQ ID NO: 9552 - DNA, 21 bp, Homo sapiens
cagggtgccatcccacctgta

SEQ ID NO: 9553 - DNA, 21 bp, Homo sapiens
accctatgtagctgctataaa

SEQ ID NO: 9554 - DNA, 21 bp, Homo sapiens
caccggaatgccaattaacta

SEQ ID NO: 9555 - DNA, 21 bp, Homo sapiens
aggaatgaagccaataattta

SEQ ID NO: 9556 - DNA, 21 bp, Homo sapiens
ccggtcttcctgcaagaagaa

SEQ ID NO: 9557 - DNA, 21 bp, Homo sapiens
ctgcattgtactaatctgtta

SEQ ID NO: 9558 - DNA, 21 bp, Homo sapiens
aagaaccaaggtagaatttaa

SEQ ID NO: 9559 - DNA, 21 bp, Homo sapiens
caggttattatggagatccaa

SEQ ID NO: 9560 - DNA, 21 bp, Homo sapiens
cagggtgacaagatatgtata

SEQ ID NO: 9561 - DNA, 21 bp, Homo sapiens
cagctttccgcctaactagaa

SEQ ID NO: 9562 - DNA, 21 bp, Homo sapiens
ttggtcgtaggtaaaggtcaa

SEQ ID NO: 9563 - DNA, 21 bp, Homo sapiens
cccacggtacatgatcctcaa

SEQ ID NO: 9564 - DNA, 21 bp, Homo sapiens
cagctacaagattgattacaa

SEQ ID NO: 9565 - DNA, 21 bp, Homo sapiens
atggaatgccttacacatcaa

SEQ ID NO: 9566 - DNA, 21 bp, Homo sapiens
cagagggaagtctgaagctaa

SEQ ID NO: 9567 - DNA, 21 bp, Homo sapiens
cagcttgaaaggagtgtttaa

SEQ ID NO: 9568 - DNA, 21 bp, Homo sapiens
cagcacgtgcatattcattta

SEQ ID NO: 9569 - DNA, 21 bp, Homo sapiens
ttgcatctaaacaataataaa

SEQ ID NO: 9570 - DNA, 21 bp, Homo sapiens
caggctaaacctgaggagtaa

SEQ ID NO: 9571 - DNA, 21 bp, Homo sapiens
cagaatcgacattctcattaa

SEQ ID NO: 9572 - DNA, 21 bp, Homo sapiens
ctgcaccacctgtttgcataa

SEQ ID NO: 9573 - DNA, 21 bp, Homo sapiens
aagataatctatttactgtaa

SEQ ID NO: 9574 - DNA, 21 bp, Homo sapiens
aagaaagaggattaaagagaa

SEQ ID NO: 9575 - DNA, 21 bp, Homo sapiens
cagaggcctaccagatgctaa

SEQ ID NO: 9576 - DNA, 21 bp, Homo sapiens
tcggacatcggagaaggtgaa

SEQ ID NO: 9577 - DNA, 21 bp, Homo sapiens
tcggtgtgtctccttcattca

SEQ ID NO: 9578 - DNA, 21 bp, Homo sapiens
ccgaagaatgtgatctttgaa

SEQ ID NO: 9579 - DNA, 21 bp, Homo sapiens
tacgttagcgctaaatgacaa

SEQ ID NO: 9580 - DNA, 21 bp, Homo sapiens
cagagtacccagaaatattaa

SEQ ID NO: 9581 - DNA, 21 bp, Homo sapiens
tagaaatactacatagggtaa

SEQ ID NO: 9582 - DNA, 21 bp, Homo sapiens
gagggaattattggatcctaa

SEQ ID NO: 9583 - DNA, 21 bp, Homo sapiens
cccgccggtgatggcgttgaa

SEQ ID NO: 9584 - DNA, 21 bp, Homo sapiens
tacgctaaatttcatccttat

SEQ ID NO: 9585 - DNA, 21 bp, Homo sapiens
tagacatatttagtaggttaa

SEQ ID NO: 9586 - DNA, 21 bp, Homo sapiens
acggaggatttgtacgctaaa

SEQ ID NO: 9587 - DNA, 21 bp, Homo sapiens
ctccgatttcgagaaagagaa

SEQ ID NO: 9588 - DNA, 21 bp, Homo sapiens
cccgttcaatgtgcgcttcaa

SEQ ID NO: 9589 - DNA, 21 bp, Homo sapiens
ttcaagtacctcgaatatgaa

SEQ ID NO: 9590 - DNA, 21 bp, Homo sapiens
accgctgccgcggataaatta

SEQ ID NO: 9591 - DNA, 21 bp, Homo sapiens
cagaggatttataattataaa

SEQ ID NO: 9592 - DNA, 21 bp, Homo sapiens
caggatttagaggcaaatgaa

SEQ ID NO: 9593 - DNA, 21 bp, Homo sapiens
cactcagttaataccgatcat

SEQ ID NO: 9594 - DNA, 21 bp, Homo sapiens
ttgcgactcttaatcaacgaa

SEQ ID NO: 9595 - DNA, 21 bp, Homo sapiens
aagcctaatgatccgacttta

SEQ ID NO: 9596 - DNA, 21 bp, Homo sapiens
caggtgactccgataatataa

SEQ ID NO: 9597 - DNA, 21 bp, Homo sapiens
aaggatgaggacaggaagcaa

SEQ ID NO: 9598 - DNA, 21 bp, Homo sapiens
cacggacagtgctgcattcaa

SEQ ID NO: 9599 - DNA, 21 bp, Homo sapiens
gggaagagaaagagtccagta

SEQ ID NO: 9600 - DNA, 21 bp, Homo sapiens
ctcagaagctctcagatccta

SEQ ID NO: 9601 - DNA, 21 bp, Homo sapiens
cccagactatataaacttcaa

SEQ ID NO: 9602 - DNA, 21 bp, Homo sapiens
tcggaccaaattgcttataaa

SEQ ID NO: 9603 - DNA, 21 bp, Homo sapiens
caacatagtgatgattcagaa

SEQ ID NO: 9604 - DNA, 21 bp, Homo sapiens
ctggccttggaacacattcaa

SEQ ID NO: 9605 - DNA, 21 bp, Homo sapiens
cagagtgtatgcactttacta

SEQ ID NO: 9606 - DNA, 21 bp, Homo sapiens
acggaatgggtcaccaaggta

SEQ ID NO: 9607 - DNA, 21 bp, Homo sapiens
ccagtgggactttgccagtta

SEQ ID NO: 9608 - DNA, 21 bp, Homo sapiens
cacgcagtgcacaatcattta

SEQ ID NO: 9609 - DNA, 21 bp, Homo sapiens
ccacaaatgctagtaaattta

SEQ ID NO: 9610 - DNA, 21 bp, Homo sapiens
cagcatcatacaggagtttat

SEQ ID NO: 9611 - DNA, 21 bp, Homo sapiens
ccgggaagagtacaaggacaa

SEQ ID NO: 9612 - DNA, 21 bp, Homo sapiens
accgctggctgtggcacttca

SEQ ID NO: 9613 - DNA, 21 bp, Homo sapiens
ctggctgtggcacttcaccaa

SEQ ID NO: 9614 - DNA, 21 bp, Homo sapiens
cccagtgaaggtgtctcagaa

SEQ ID NO: 9615 - DNA, 21 bp, Homo sapiens
ctcgagaatactgcccagtta

SEQ ID NO: 9616 - DNA, 21 bp, Homo sapiens
tgggatgaagactatagggta

SEQ ID NO: 9617 - DNA, 21 bp, Homo sapiens
cacgacaggcttgctgaatga

SEQ ID NO: 9618 - DNA, 21 bp, Homo sapiens
cagcaataaccgtctaataaa

SEQ ID NO: 9619 - DNA, 21 bp, Homo sapiens
gaggcttcattcttacagtaa

SEQ ID NO: 9620 - DNA, 21 bp, Homo sapiens
cacctgaacaccagaattaga

SEQ ID NO: 9621 - DNA, 21 bp, Homo sapiens
aaggaaccaactgaagattat

SEQ ID NO: 9622 - DNA, 21 bp, Homo sapiens
caccagaattagaattaaaca

SEQ ID NO: 9623 - DNA, 21 bp, Homo sapiens
cacaaagtgggctctcaataa

SEQ ID NO: 9624 - DNA, 21 bp, Homo sapiens
tcgagggtagataggccttaa

SEQ ID NO: 9625 - DNA, 21 bp, Homo sapiens
aagctcaccgttaagctactg

SEQ ID NO: 9626 - DNA, 21 bp, Homo sapiens
aacgatgagagcgtcaagaag

SEQ ID NO: 9627 - DNA, 21 bp, Homo sapiens
ccggctgactctagccaagga

SEQ ID NO: 9628 - DNA, 21 bp, Homo sapiens
cccgggcctgctctacctcaa

SEQ ID NO: 9629 - DNA, 21 bp, Homo sapiens
caccggtctttcccatgttaa

SEQ ID NO: 9630 - DNA, 21 bp, Homo sapiens
ttggctggtgtaccaaatgta

SEQ ID NO: 9631 - DNA, 21 bp, Homo sapiens
tccgaattagtacgccttgaa

SEQ ID NO: 9632 - DNA, 21 bp, Homo sapiens
aacgacttgttctctatcgaa

SEQ ID NO: 9633 - DNA, 21 bp, Homo sapiens
cacctgcagaataacctgata

SEQ ID NO: 9634 - DNA, 21 bp, Homo sapiens
cagggacagcttctctcccaa

SEQ ID NO: 9635 - DNA, 21 bp, Homo sapiens
accagtgtaatgtatcaataa

SEQ ID NO: 9636 - DNA, 21 bp, Homo sapiens
ccagtgtaatgtatcaataaa

SEQ ID NO: 9637 - DNA, 21 bp, Homo sapiens
ccaccactcaatgaccttcaa

SEQ ID NO: 9638 - DNA, 21 bp, Homo sapiens
ccgaatcttcatgcaaggaaa

SEQ ID NO: 9639 - DNA, 21 bp, Homo sapiens
cccaaggtgtgacacagttta

SEQ ID NO: 9640 - DNA, 21 bp, Homo sapiens
caggcgagtgactgtcaagaa

SEQ ID NO: 9641 - DNA, 21 bp, Homo sapiens
ctgacgattatcgatgttcat

SEQ ID NO: 9642 - DNA, 21 bp, Homo sapiens
ctgccagaacttagctctgta

SEQ ID NO: 9643 - DNA, 21 bp, Homo sapiens
gtcgggtatatgaatacacaa

SEQ ID NO: 9644 - DNA, 21 bp, Homo sapiens
tcgctaagaccttgactttaa

SEQ ID NO: 9645 - DNA, 21 bp, Homo sapiens
caacttaggtatacaatataa

SEQ ID NO: 9646 - DNA, 21 bp, Homo sapiens
cacgggagtcataacactaaa

SEQ ID NO: 9647 - DNA, 21 bp, Homo sapiens
ccggagaggcatggacattaa

SEQ ID NO: 9648 - DNA, 21 bp, Homo sapiens
cagcgttggatcaacactgta

SEQ ID NO: 9649 - DNA, 21 bp, Homo sapiens
aagcaggagaatccaaagtaa

SEQ ID NO: 9650 - DNA, 21 bp, Homo sapiens
caggacagaggcaatatacaa

SEQ ID NO: 9651 - DNA, 21 bp, Homo sapiens
cagcaataatatgcaaatgaa

SEQ ID NO: 9652 - DNA, 21 bp, Homo sapiens
ctggaagtaagaagaattaaa

SEQ ID NO: 9653 - DNA, 21 bp, Homo sapiens
caggccaatgataaccttata

SEQ ID NO: 9654 - DNA, 21 bp, Homo sapiens
cccggaatacatggtgtacat

SEQ ID NO: 9655 - DNA, 21 bp, Homo sapiens
ctccatgaacattgtgagcaa

SEQ ID NO: 9656 - DNA, 21 bp, Homo sapiens
ccgagacaagtgaaacgggaa

SEQ ID NO: 9657 - DNA, 21 bp, Homo sapiens
ccgctttgtggccatctgtaa

SEQ ID NO: 9658 - DNA, 21 bp, Homo sapiens
ttcactcgtccttagctctta

SEQ ID NO: 9659 - DNA, 21 bp, Homo sapiens
caccactatcctgaagataca

SEQ ID NO: 9660 - DNA, 21 bp, Homo sapiens
aacagtggagatgttgacaaa

SEQ ID NO: 9661 - DNA, 21 bp, Homo sapiens
ccgggtgtaagtctaacgcca

SEQ ID NO: 9662 - DNA, 21 bp, Homo sapiens
gtgggcctggatcaaagttaa

SEQ ID NO: 9663 - DNA, 21 bp, Homo sapiens
cccaatgactgtagcattcaa

SEQ ID NO: 9664 - DNA, 21 bp, Homo sapiens
caggcagacatcagtccacat

SEQ ID NO: 9665 - DNA, 21 bp, Homo sapiens
caggtcttaagtgcaaatcaa

SEQ ID NO: 9666 - DNA, 21 bp, Homo sapiens
caggtgcaattccaagcataa

SEQ ID NO: 9667 - DNA, 21 bp, Homo sapiens
caccgagaagctgaaacggaa

SEQ ID NO: 9668 - DNA, 21 bp, Homo sapiens
caagtatttgttggttcataa

SEQ ID NO: 9669 - DNA, 21 bp, Homo sapiens
ccagacctcgaccatgataaa

SEQ ID NO: 9670 - DNA, 21 bp, Homo sapiens
cagctacaacttagatcccta

SEQ ID NO: 9671 - DNA, 21 bp, Homo sapiens
ctccaagaattgtgcaagtaa

SEQ ID NO: 9672 - DNA, 21 bp, Homo sapiens
taggcttaacataaagccgaa

SEQ ID NO: 9673 - DNA, 21 bp, Homo sapiens
ctgcgtttatcctgacaggaa

SEQ ID NO: 9674 - DNA, 21 bp, Homo sapiens
ctcatgatgaacttcacttta

SEQ ID NO: 9675 - DNA, 21 bp, Homo sapiens
agaactgaaggttgccatgaa

SEQ ID NO: 9676 - DNA, 21 bp, Homo sapiens
tgcctctgtcatctacctcaa

SEQ ID NO: 9677 - DNA, 21 bp, Homo sapiens
ttggcctgtggaaataatgta

SEQ ID NO: 9678 - DNA, 21 bp, Homo sapiens
caccctgatggccaccaccta

SEQ ID NO: 9679 - DNA, 21 bp, Homo sapiens
caccttgatgggcatcaccta

SEQ ID NO: 9680 - DNA, 21 bp, Homo sapiens
ttcagtaaactctacccagaa

SEQ ID NO: 9681 - DNA, 21 bp, Homo sapiens
gaccttcttcagtaaactcta

SEQ ID NO: 9682 - DNA, 21 bp, Homo sapiens
aagaagaccttcttcagtaaa

SEQ ID NO: 9683 - DNA, 21 bp, Homo sapiens
cagatgcagttcgaacattaa

SEQ ID NO: 9684 - DNA, 21 bp, Homo sapiens
gaggactatctcgatgatgaa

SEQ ID NO: 9685 - DNA, 21 bp, Homo sapiens
agccaaagcaaggccctacaa

SEQ ID NO: 9686 - DNA, 21 bp, Homo sapiens
ctgaggcagcactggcattaa

SEQ ID NO: 9687 - DNA, 21 bp, Homo sapiens
aaggaatttgatgaagatgta

SEQ ID NO: 9688 - DNA, 21 bp, Homo sapiens
ttggaccagtatcatcttcaa

SEQ ID NO: 9689 - DNA, 21 bp, Homo sapiens
ctgtggaatcctattctctta

SEQ ID NO: 9690 - DNA, 21 bp, Homo sapiens
cgcagaggactctgacatgca

SEQ ID NO: 9691 - DNA, 21 bp, Homo sapiens
ctggtgaatatccaaacacaa

SEQ ID NO: 9692 - DNA, 21 bp, Homo sapiens
ctgcagttacaccaccttcta

SEQ ID NO: 9693 - DNA, 21 bp, Homo sapiens
aagataatttattggctataa

SEQ ID NO: 9694 - DNA, 21 bp, Homo sapiens
aactggtcttgtagaatttaa

SEQ ID NO: 9695 - DNA, 21 bp, Homo sapiens
acagtcagagatgaccttaaa

SEQ ID NO: 9696 - DNA, 21 bp, Homo sapiens
aagcttagtgcccatatataa

SEQ ID NO: 9697 - DNA, 21 bp, Homo sapiens
ctgctagacaacgtttgatca

SEQ ID NO: 9698 - DNA, 21 bp, Homo sapiens
tacgtaggtcatgtaagcaaa

SEQ ID NO: 9699 - DNA, 21 bp, Homo sapiens
tagctccataaggcacacaaa

SEQ ID NO: 9700 - DNA, 21 bp, Homo sapiens
ccacattaaagttgcaaataa

SEQ ID NO: 9701 - DNA, 21 bp, Homo sapiens
aacgctgatcccataatgcat

SEQ ID NO: 9702 - DNA, 21 bp, Homo sapiens
tcggaaggacacacgctataa

SEQ ID NO: 9703 - DNA, 21 bp, Homo sapiens
ggcctttggaataacaatcaa

SEQ ID NO: 9704 - DNA, 21 bp, Homo sapiens
caccattgtactcttacacaa

SEQ ID NO: 9705 - DNA, 21 bp, Homo sapiens
ctgcctcatcatcgacagtaa

SEQ ID NO: 9706 - DNA, 21 bp, Homo sapiens
ctgctgcacattggcacccaa

SEQ ID NO: 9707 - DNA, 21 bp, Homo sapiens
acggtcttcctgcatatttaa

SEQ ID NO: 9708 - DNA, 21 bp, Homo sapiens
ctggattatgtagaagattta

SEQ ID NO: 9709 - DNA, 21 bp, Homo sapiens
tagctctgacacaaatgcaaa

SEQ ID NO: 9710 - DNA, 21 bp, Homo sapiens
ccggccaatggcctcaggcta

SEQ ID NO: 9711 - DNA, 21 bp, Homo sapiens
caggataacaccaccaactat

SEQ ID NO: 9712 - DNA, 21 bp, Homo sapiens
aaggaacactttaagtacgta

SEQ ID NO: 9713 - DNA, 21 bp, Homo sapiens
aagctgtaacagaaaggtcaa

SEQ ID NO: 9714 - DNA, 21 bp, Homo sapiens
ctgcggaagttggttcatgaa

SEQ ID NO: 9715 - DNA, 21 bp, Homo sapiens
accgctcaagtctgccttaaa

SEQ ID NO: 9716 - DNA, 21 bp, Homo sapiens
cagcagtatatatgtgctgaa

SEQ ID NO: 9717 - DNA, 21 bp, Homo sapiens
ccgatatgtcctgcactacta

SEQ ID NO: 9718 - DNA, 21 bp, Homo sapiens
aagctatgtacaattaactaa

SEQ ID NO: 9719 - DNA, 21 bp, Homo sapiens
ctgacacatttgagtgtccaa

SEQ ID NO: 9720 - DNA, 21 bp, Homo sapiens
ctgtatcccattattactata

SEQ ID NO: 9721 - DNA, 21 bp, Homo sapiens
ctccatgatggtggccagtaa

SEQ ID NO: 9722 - DNA, 21 bp, Homo sapiens
ctggctctggtgtacattgaa

SEQ ID NO: 9723 - DNA, 21 bp, Homo sapiens
ctgccatttatcatgagatta

SEQ ID NO: 9724 - DNA, 21 bp, Homo sapiens
tgccatttatcatgagattaa

SEQ ID NO: 9725 - DNA, 21 bp, Homo sapiens
ctgggaaagaatcccgggaaa

SEQ ID NO: 9726 - DNA, 21 bp, Homo sapiens
atggcaaatattcaccaggaa

SEQ ID NO: 9727 - DNA, 21 bp, Homo sapiens
tacataaagatgagtaatata

SEQ ID NO: 9728 - DNA, 21 bp, Homo sapiens
acaggtatatacagcatataa

SEQ ID NO: 9729 - DNA, 21 bp, Homo sapiens
ctggtacataaagatgagtaa

SEQ ID NO: 9730 - DNA, 21 bp, Homo sapiens
caggtatatacagcatataaa

SEQ ID NO: 9731 - DNA, 21 bp, Homo sapiens
aaggtgcttacgaacaagtaa

SEQ ID NO: 9732 - DNA, 21 bp, Homo sapiens
aagggcagaccttgacactta

SEQ ID NO: 9733 - DNA, 21 bp, Homo sapiens
tagggtaacagtgtccataat

SEQ ID NO: 9734 - DNA, 21 bp, Homo sapiens
tacgtattaaatgcacgttaa

SEQ ID NO: 9735 - DNA, 21 bp, Homo sapiens
ctgaatgtaaatcatgataaa

SEQ ID NO: 9736 - DNA, 21 bp, Homo sapiens
aagctctttgctacagatgaa

SEQ ID NO: 9737 - DNA, 21 bp, Homo sapiens
ccgaatatagtgagattgtaa

SEQ ID NO: 9738 - DNA, 21 bp, Homo sapiens
cagggaatgatataagctgga

SEQ ID NO: 9739 - DNA, 21 bp, Homo sapiens
tagtgagattgtaacgtgaaa

SEQ ID NO: 9740 - DNA, 21 bp, Homo sapiens
ctggaggagtctgaccctgta

SEQ ID NO: 9741 - DNA, 21 bp, Homo sapiens
ctactctgtgtaatagaataa

SEQ ID NO: 9742 - DNA, 21 bp, Homo sapiens
cctcagatagtttgtatccaa

SEQ ID NO: 9743 - DNA, 21 bp, Homo sapiens
cctcttgtggttctcaataaa

SEQ ID NO: 9744 - DNA, 21 bp, Homo sapiens
cccgtaacttattatcacttt

SEQ ID NO: 9745 - DNA, 21 bp, Homo sapiens
tcggtcgttcatctttaaata

SEQ ID NO: 9746 - DNA, 21 bp, Homo sapiens
ctggaaattggtcaaggacaa

SEQ ID NO: 9747 - DNA, 21 bp, Homo sapiens
taggtagtataataaaggtaa

SEQ ID NO: 9748 - DNA, 21 bp, Homo sapiens
ctgggccttattaaagagcaa

SEQ ID NO: 9749 - DNA, 21 bp, Homo sapiens
caggcggtactcagacaaata

SEQ ID NO: 9750 - DNA, 21 bp, Homo sapiens
caagacctccttaataatgaa

SEQ ID NO: 9751 - DNA, 21 bp, Homo sapiens
ctgaaagacctttctctggaa

SEQ ID NO: 9752 - DNA, 21 bp, Homo sapiens
ccgcacgtcttcactaaagga

SEQ ID NO: 9753 - DNA, 21 bp, Homo sapiens
gacgacgaacaatgaactaaa

SEQ ID NO: 9754 - DNA, 21 bp, Homo sapiens
ctaggtggttacaaatcataa

SEQ ID NO: 9755 - DNA, 21 bp, Homo sapiens
caggagagcaacttaccttca

SEQ ID NO: 9756 - DNA, 21 bp, Homo sapiens
ccctgtgtgtttcgccagtta

SEQ ID NO: 9757 - DNA, 21 bp, Homo sapiens
caggttggtcaatgtatccaa

SEQ ID NO: 9758 - DNA, 21 bp, Homo sapiens
caggaaagtatgttagctata

SEQ ID NO: 9759 - DNA, 21 bp, Homo sapiens
caggttgttatctgtctatta

SEQ ID NO: 9760 - DNA, 21 bp, Homo sapiens
agccagtatatttaaaggtaa

SEQ ID NO: 9761 - DNA, 21 bp, Homo sapiens
cacccattatatttcattgaa

SEQ ID NO: 9762 - DNA, 21 bp, Homo sapiens
caggtataattactaattata

SEQ ID NO: 9763 - DNA, 21 bp, Homo sapiens
tccgataatcttgcagtgcaa

SEQ ID NO: 9764 - DNA, 21 bp, Homo sapiens
ctgcaggaatttagtaacatt

SEQ ID NO: 9765 - DNA, 21 bp, Homo sapiens
ccgggctgtggtctagcataa

SEQ ID NO: 9766 - DNA, 21 bp, Homo sapiens
caagcaccatatggaaataaa

SEQ ID NO: 9767 - DNA, 21 bp, Homo sapiens
atgggaatacctaccaggtaa

SEQ ID NO: 9768 - DNA, 21 bp, Homo sapiens
ctggaggtcatccattaggaa

SEQ ID NO: 9769 - DNA, 21 bp, Homo sapiens
ctgggactggatcggcttata

SEQ ID NO: 9770 - DNA, 21 bp, Homo sapiens
caggtaacattcagtgaggaa

SEQ ID NO: 9771 - DNA, 21 bp, Homo sapiens
caggtggaccatcctcccaaa

SEQ ID NO: 9772 - DNA, 21 bp, Homo sapiens
cagagggaaggtcacaggcaa

SEQ ID NO: 9773 - DNA, 21 bp, Homo sapiens
ctcaccagttctagcgagtaa

SEQ ID NO: 9774 - DNA, 21 bp, Homo sapiens
ctggtcatgtcaccataataa

SEQ ID NO: 9775 - DNA, 21 bp, Homo sapiens
ccagttggtgtcagccctgta

SEQ ID NO: 9776 - DNA, 21 bp, Homo sapiens
atggatgctgacctccttata

SEQ ID NO: 9777 - DNA, 21 bp, Homo sapiens
ccagattacctggaattcata

SEQ ID NO: 9778 - DNA, 21 bp, Homo sapiens
ccaggatatcaccgaatgcaa

SEQ ID NO: 9779 - DNA, 21 bp, Homo sapiens
taccaactgcatgaagtataa

SEQ ID NO: 9780 - DNA, 21 bp, Homo sapiens
ccggcttgagaaagagtcata

SEQ ID NO: 9781 - DNA, 21 bp, Homo sapiens
ctgcagagcttcatttggaaa

SEQ ID NO: 9782 - DNA, 21 bp, Homo sapiens
cagcatatctcgagagggcaa

SEQ ID NO: 9783 - DNA, 21 bp, Homo sapiens
cacagtgatcactgaagggaa

SEQ ID NO: 9784 - DNA, 21 bp, Homo sapiens
caacagtatggtgcgcataaa

SEQ ID NO: 9785 - DNA, 21 bp, Homo sapiens
ccggagaacatctgccatcaa

SEQ ID NO: 9786 - DNA, 21 bp, Homo sapiens
cagtggatgtgcaattcttaa

SEQ ID NO: 9787 - DNA, 21 bp, Homo sapiens
ctgagtggaaattctttaata

SEQ ID NO: 9788 - DNA, 21 bp, Homo sapiens
caagcctactttgcagcttaa

SEQ ID NO: 9789 - DNA, 21 bp, Homo sapiens
ttggaattcacacatgcataa

SEQ ID NO: 9790 - DNA, 21 bp, Homo sapiens
aacgctctgtttagtatgtat

SEQ ID NO: 9791 - DNA, 21 bp, Homo sapiens
ccagcccacactgcagctgaa

SEQ ID NO: 9792 - DNA, 21 bp, Homo sapiens
tccagtcactattgccttaat

SEQ ID NO: 9793 - DNA, 21 bp, Homo sapiens
ctgggcctgaatggactcaat

SEQ ID NO: 9794 - DNA, 21 bp, Homo sapiens
aaaggatataatggatttgta

SEQ ID NO: 9795 - DNA, 21 bp, Homo sapiens
cggaatggactggcctcacaa

SEQ ID NO: 9796 - DNA, 21 bp, Homo sapiens
ttgcacctttgtgccaagaaa

SEQ ID NO: 9797 - DNA, 21 bp, Homo sapiens
ctgctgtttcttcttaccatt

SEQ ID NO: 9798 - DNA, 21 bp, Homo sapiens
ccagagaaagtgtgaggtcaa

SEQ ID NO: 9799 - DNA, 21 bp, Homo sapiens
tacatcgtttctagaccatta

SEQ ID NO: 9800 - DNA, 21 bp, Homo sapiens
ctcaatggaactcctggtaaa

SEQ ID NO: 9801 - DNA, 21 bp, Homo sapiens
ccgctactgtgtgatcattca

SEQ ID NO: 9802 - DNA, 21 bp, Homo sapiens
caccagttcggatgaactcaa

SEQ ID NO: 9803 - DNA, 21 bp, Homo sapiens
tcgggcctgcctggtggtcta

SEQ ID NO: 9804 - DNA, 21 bp, Homo sapiens
tagagatatagcagtgaccaa

SEQ ID NO: 9805 - DNA, 21 bp, Homo sapiens
cagcaagaaatccaccagcca

SEQ ID NO: 9806 - DNA, 21 bp, Homo sapiens
cacgtgctggacaaatcttaa

SEQ ID NO: 9807 - DNA, 21 bp, Homo sapiens
ctggatgttaccaccaagtaa

SEQ ID NO: 9808 - DNA, 21 bp, Homo sapiens
caggatcaccatccatctcaa

SEQ ID NO: 9809 - DNA, 21 bp, Homo sapiens
agggaagaacatctactataa

SEQ ID NO: 9810 - DNA, 21 bp, Homo sapiens
aacatcagtgctgatagtgaa

SEQ ID NO: 9811 - DNA, 21 bp, Homo sapiens
cagacggaagggtaaacaata

SEQ ID NO: 9812 - DNA, 21 bp, Homo sapiens
gacggaagggtaaacaatata

SEQ ID NO: 9813 - DNA, 21 bp, Homo sapiens
ctggagttatgtggacactaa

SEQ ID NO: 9814 - DNA, 21 bp, Homo sapiens
ttggaataaatttatctccaa

SEQ ID NO: 9815 - DNA, 21 bp, Homo sapiens
tacattaaagttatttcttaa

SEQ ID NO: 9816 - DNA, 21 bp, Homo sapiens
caccattgtggtcaagagcta

SEQ ID NO: 9817 - DNA, 21 bp, Homo sapiens
cccgcccagtatgaaagctga

SEQ ID NO: 9818 - DNA, 21 bp, Homo sapiens
ttggacttcctttgggactaa

SEQ ID NO: 9819 - DNA, 21 bp, Homo sapiens
ccgactatgactggaacgaga

SEQ ID NO: 9820 - DNA, 21 bp, Homo sapiens
atcaattgcagggatgcttaa

SEQ ID NO: 9821 - DNA, 21 bp, Homo sapiens
cagactggagtggacctggaa

SEQ ID NO: 9822 - DNA, 21 bp, Homo sapiens
ccggagctctatgcctcagta

SEQ ID NO: 9823 - DNA, 21 bp, Homo sapiens
caggttatggatgatgaatca

SEQ ID NO: 9824 - DNA, 21 bp, Homo sapiens
aagaagcaaactcaccttaaa

SEQ ID NO: 9825 - DNA, 21 bp, Homo sapiens
caggaggtaggtggagggcaa

SEQ ID NO: 9826 - DNA, 21 bp, Homo sapiens
cacgtcaaactctcttcccaa

SEQ ID NO: 9827 - DNA, 21 bp, Homo sapiens
gtgggtgtgtataataatgaa

SEQ ID NO: 9828 - DNA, 21 bp, Homo sapiens
ctgcaaaggattcatctgtaa

SEQ ID NO: 9829 - DNA, 21 bp, Homo sapiens
cagcaagtatccattgaagaa

SEQ ID NO: 9830 - DNA, 21 bp, Homo sapiens
ccgctgtgcattgcagcatta

SEQ ID NO: 9831 - DNA, 21 bp, Homo sapiens
ccactcgttctaggaatgtta

SEQ ID NO: 9832 - DNA, 21 bp, Homo sapiens
ctggctactatccggatgaaa

SEQ ID NO: 9833 - DNA, 21 bp, Homo sapiens
cccgatggtgttatacattaa

SEQ ID NO: 9834 - DNA, 21 bp, Homo sapiens
gaagattaacgtcaacgtcaa

SEQ ID NO: 9835 - DNA, 21 bp, Homo sapiens
aaggagcataattgtagagaa

SEQ ID NO: 9836 - DNA, 21 bp, Homo sapiens
cccacatgtcattgaaattta

SEQ ID NO: 9837 - DNA, 21 bp, Homo sapiens
caggtgtgctatacttatgtt

SEQ ID NO: 9838 - DNA, 21 bp, Homo sapiens
ttggcacgtgtggaccatcta

SEQ ID NO: 9839 - DNA, 21 bp, Homo sapiens
tgggatggtctagtaaggata

SEQ ID NO: 9840 - DNA, 21 bp, Homo sapiens
ctggtccaatctattcataat

SEQ ID NO: 9841 - DNA, 21 bp, Homo sapiens
cgggaactactttgaacacaa

SEQ ID NO: 9842 - DNA, 21 bp, Homo sapiens
caggattacaccaggaagcaa

SEQ ID NO: 9843 - DNA, 21 bp, Homo sapiens
aaggatgagtttcttaagaca

SEQ ID NO: 9844 - DNA, 21 bp, Homo sapiens
agagtacatgttggaactcta

SEQ ID NO: 9845 - DNA, 21 bp, Homo sapiens
tacgatggagtagaccggaaa

SEQ ID NO: 9846 - DNA, 21 bp, Homo sapiens
cccgctctacatcgacttcaa

SEQ ID NO: 9847 - DNA, 21 bp, Homo sapiens
ccgacagctgtttctattgaa

SEQ ID NO: 9848 - DNA, 21 bp, Homo sapiens
accgtacagtattgcaaccaa

SEQ ID NO: 9849 - DNA, 21 bp, Homo sapiens
ctgcgggagatagaacaatat

SEQ ID NO: 9850 - DNA, 21 bp, Homo sapiens
tagggcttcggtggtaatcat

SEQ ID NO: 9851 - DNA, 21 bp, Homo sapiens
tcggtccattacccagagtta

SEQ ID NO: 9852 - DNA, 21 bp, Homo sapiens
aagagagatttcggtccatta

SEQ ID NO: 9853 - DNA, 21 bp, Homo sapiens
cagttgggacatggtcttaaa

SEQ ID NO: 9854 - DNA, 21 bp, Homo sapiens
ctcagaaggactagtattcaa

SEQ ID NO: 9855 - DNA, 21 bp, Homo sapiens
caggtagtccatggacattaa

SEQ ID NO: 9856 - DNA, 21 bp, Homo sapiens
accgtggaagaccaatataaa

SEQ ID NO: 9857 - DNA, 21 bp, Homo sapiens
ttggatcatctgcaccaatta

SEQ ID NO: 9858 - DNA, 21 bp, Homo sapiens
cgggaggctagtgatatacta

SEQ ID NO: 9859 - DNA, 21 bp, Homo sapiens
ggcgaggtaaatggtcttaaa

SEQ ID NO: 9860 - DNA, 21 bp, Homo sapiens
cagcggtatactgctgaacaa

SEQ ID NO: 9861 - DNA, 21 bp, Homo sapiens
ctgacgtgcatcagtcttcaa

SEQ ID NO: 9862 - DNA, 21 bp, Homo sapiens
tcagagtttcgtgaccaacta

SEQ ID NO: 9863 - DNA, 21 bp, Homo sapiens
ctccctatcatattaacttta

SEQ ID NO: 9864 - DNA, 21 bp, Homo sapiens
aagttgaatagtttaccttaa

SEQ ID NO: 9865 - DNA, 21 bp, Homo sapiens
agccaagaagagagcattaaa

SEQ ID NO: 9866 - DNA, 21 bp, Homo sapiens
aaagatgtgttgactcagaaa

SEQ ID NO: 9867 - DNA, 21 bp, Homo sapiens
ccgcctgctcttggagaacta

SEQ ID NO: 9868 - DNA, 21 bp, Homo sapiens
ccggccggccgcagccatgaa

SEQ ID NO: 9869 - DNA, 21 bp, Homo sapiens
tccctccaactctgtctctaa

SEQ ID NO: 9870 - DNA, 21 bp, Homo sapiens
cccgatggcatcaaggtcttt

SEQ ID NO: 9871 - DNA, 21 bp, Homo sapiens
acggaattctttatcaataaa

SEQ ID NO: 9872 - DNA, 21 bp, Homo sapiens
caggaagaagatgagccttaa

SEQ ID NO: 9873 - DNA, 21 bp, Homo sapiens
cccgcgctgcaggatctgcaa

SEQ ID NO: 9874 - DNA, 21 bp, Homo sapiens
aaggaggcttgtagaaagcaa

SEQ ID NO: 9875 - DNA, 21 bp, Homo sapiens
ctggaagacttggaacctcaa

SEQ ID NO: 9876 - DNA, 21 bp, Homo sapiens
accctcagtttccactattaa

SEQ ID NO: 9877 - DNA, 21 bp, Homo sapiens
cagcataaccaaatcttacta

SEQ ID NO: 9878 - DNA, 21 bp, Homo sapiens
acgctgtaagcaggaagagaa

SEQ ID NO: 9879 - DNA, 21 bp, Homo sapiens
ctgaatgtctccaagcaaata

SEQ ID NO: 9880 - DNA, 21 bp, Homo sapiens
taggagctgggaggaagataa

SEQ ID NO: 9881 - DNA, 21 bp, Homo sapiens
cgggaaggactgcgaacctta

SEQ ID NO: 9882 - DNA, 21 bp, Homo sapiens
cccagaatgcccagaagagaa

SEQ ID NO: 9883 - DNA, 21 bp, Homo sapiens
cagatgcaaataccataatta

SEQ ID NO: 9884 - DNA, 21 bp, Homo sapiens
cggcaattcactaacaagaaa

SEQ ID NO: 9885 - DNA, 21 bp, Homo sapiens
caggaatcgatcggattgtaa

SEQ ID NO: 9886 - DNA, 21 bp, Homo sapiens
tcggattgtaaggacattgat

SEQ ID NO: 9887 - DNA, 21 bp, Homo sapiens
ctgcagggaaatgcacttcaa

SEQ ID NO: 9888 - DNA, 21 bp, Homo sapiens
tggattgtagttagaatacta

SEQ ID NO: 9889 - DNA, 21 bp, Homo sapiens
taggacaaagtttatctataa

SEQ ID NO: 9890 - DNA, 21 bp, Homo sapiens
tcggatggccatgctcgtcaa

SEQ ID NO: 9891 - DNA, 21 bp, Homo sapiens
atggataagtctatgcatcta

SEQ ID NO: 9892 - DNA, 21 bp, Homo sapiens
ctagaatataagggaggtaaa

SEQ ID NO: 9893 - DNA, 21 bp, Homo sapiens
tagctatgcctttatggttaa

SEQ ID NO: 9894 - DNA, 21 bp, Homo sapiens
ttcatctatgttgcaattcaa

SEQ ID NO: 9895 - DNA, 21 bp, Homo sapiens
tcgaagagttgtcgtctataa

SEQ ID NO: 9896 - DNA, 21 bp, Homo sapiens
taccctttccatgacattgaa

SEQ ID NO: 9897 - DNA, 21 bp, Homo sapiens
caggttgtcccacatgtataa

SEQ ID NO: 9898 - DNA, 21 bp, Homo sapiens
cacgtggactctagtatgtaa

SEQ ID NO: 9899 - DNA, 21 bp, Homo sapiens
caggaaggaggaggtctataa

SEQ ID NO: 9900 - DNA, 21 bp, Homo sapiens
cagaaggaaatcaactcccta

SEQ ID NO: 9901 - DNA, 21 bp, Homo sapiens
atgagtgttgtgcctacttaa

SEQ ID NO: 9902 - DNA, 21 bp, Homo sapiens
aagcaatacttaggaggctta

SEQ ID NO: 9903 - DNA, 21 bp, Homo sapiens
tagaagaaccttcttagacaa

SEQ ID NO: 9904 - DNA, 21 bp, Homo sapiens
caccgctgccatagccagtaa

SEQ ID NO: 9905 - DNA, 21 bp, Homo sapiens
ccgggcaaacttgctggctat

SEQ ID NO: 9906 - DNA, 21 bp, Homo sapiens
cacaatgctgattaaacataa

SEQ ID NO: 9907 - DNA, 21 bp, Homo sapiens
ctgattaaacataataaacaa

SEQ ID NO: 9908 - DNA, 21 bp, Homo sapiens
gaggaagttgttcacagcaat

SEQ ID NO: 9909 - DNA, 21 bp, Homo sapiens
atggctgacagccttgactta

SEQ ID NO: 9910 - DNA, 21 bp, Homo sapiens
caccttgatcatcgacattct

SEQ ID NO: 9911 - DNA, 21 bp, Homo sapiens
gccgctgaggatgtcccgaaa

SEQ ID NO: 9912 - DNA, 21 bp, Homo sapiens
cagccttgacttatccgaatt

SEQ ID NO: 9913 - DNA, 21 bp, Homo sapiens
tagacagatttggaaatataa

SEQ ID NO: 9914 - DNA, 21 bp, Homo sapiens
agggaactttatgatcaaata

SEQ ID NO: 9915 - DNA, 21 bp, Homo sapiens
cagtaatatatagtaaagtaa

SEQ ID NO: 9916 - DNA, 21 bp, Homo sapiens
tagcttatgtatgatccttaa

SEQ ID NO: 9917 - DNA, 21 bp, Homo sapiens
tgggctctctttacctatgaa

SEQ ID NO: 9918 - DNA, 21 bp, Homo sapiens
atccgtgtctctgaagaacaa

SEQ ID NO: 9919 - DNA, 21 bp, Homo sapiens
aaggcccgaacaagacaggaa

SEQ ID NO: 9920 - DNA, 21 bp, Homo sapiens
gaggtggatatggtcgacata

SEQ ID NO: 9921 - DNA, 21 bp, Homo sapiens
acggaggacttcctggttcaa

SEQ ID NO: 9922 - DNA, 21 bp, Homo sapiens
ctccagcagcatcgacatcaa

SEQ ID NO: 9923 - DNA, 21 bp, Homo sapiens
aagcaactttatgaatatcta

SEQ ID NO: 9924 - DNA, 21 bp, Homo sapiens
gtggaagatcatagtaatgaa

SEQ ID NO: 9925 - DNA, 21 bp, Homo sapiens
ccgagtcagtatccagcccaa

SEQ ID NO: 9926 - DNA, 21 bp, Homo sapiens
acgggtcgggacaccagtgaa

SEQ ID NO: 9927 - DNA, 21 bp, Homo sapiens
tcccgaagtctccatactaaa

SEQ ID NO: 9928 - DNA, 21 bp, Homo sapiens
aaccagtacccttacatataa

SEQ ID NO: 9929 - DNA, 21 bp, Homo sapiens
caggtggatttagacaagtaa

SEQ ID NO: 9930 - DNA, 21 bp, Homo sapiens
caggaaggtatagtccttcaa

SEQ ID NO: 9931 - DNA, 21 bp, Homo sapiens
ctggtacttaggcaccataaa

SEQ ID NO: 9932 - DNA, 21 bp, Homo sapiens
aagaataattagcagcgttaa

SEQ ID NO: 9933 - DNA, 21 bp, Homo sapiens
ccggataaagaagaacggaca

SEQ ID NO: 9934 - DNA, 21 bp, Homo sapiens
aaggcatttataaagatcgaa

SEQ ID NO: 9935 - DNA, 21 bp, Homo sapiens
caggaaatgcttggaaagcta

SEQ ID NO: 9936 - DNA, 21 bp, Homo sapiens
ccgcaggacatttctgattta

SEQ ID NO: 9937 - DNA, 21 bp, Homo sapiens
tagcctggccacagaattaaa

SEQ ID NO: 9938 - DNA, 21 bp, Homo sapiens
ccgattccacgtttcctttaa

SEQ ID NO: 9939 - DNA, 21 bp, Homo sapiens
tcgggcgacatgcagaagcaa

SEQ ID NO: 9940 - DNA, 21 bp, Homo sapiens
cacgccatttcaactgagaaa

SEQ ID NO: 9941 - DNA, 21 bp, Homo sapiens
tcagttgatcctaattagcaa

SEQ ID NO: 9942 - DNA, 21 bp, Homo sapiens
agcaaattacttcatcatcta

SEQ ID NO: 9943 - DNA, 21 bp, Homo sapiens
tccggctatatgggcaacaaa

SEQ ID NO: 9944 - DNA, 21 bp, Homo sapiens
tcagctatagctgcagtttaa

SEQ ID NO: 9945 - DNA, 21 bp, Homo sapiens
ctggttcatcttccttctcaa

SEQ ID NO: 9946 - DNA, 21 bp, Homo sapiens
ctgcttcttcatgtatcttta

SEQ ID NO: 9947 - DNA, 21 bp, Homo sapiens
cacggtcaccctcatcaacaa

SEQ ID NO: 9948 - DNA, 21 bp, Homo sapiens
cagcgagaggagcatctacaa

SEQ ID NO: 9949 - DNA, 21 bp, Homo sapiens
caggatatcgacagcagatta

SEQ ID NO: 9950 - DNA, 21 bp, Homo sapiens
cccaatttatccaagttctaa

SEQ ID NO: 9951 - DNA, 21 bp, Homo sapiens
ctgacttgacacgtttgtaaa

SEQ ID NO: 9952 - DNA, 21 bp, Homo sapiens
cagaacgtagattagcttata

SEQ ID NO: 9953 - DNA, 21 bp, Homo sapiens
atcggtgttgtggaggagaaa

SEQ ID NO: 9954 - DNA, 21 bp, Homo sapiens
ctagagcacgatagagggaaa

SEQ ID NO: 9955 - DNA, 21 bp, Homo sapiens
ctctgtttgattatttattta

SEQ ID NO: 9956 - DNA, 21 bp, Homo sapiens
acccaagatctcagagtcaaa

SEQ ID NO: 9957 - DNA, 21 bp, Homo sapiens
ctggtctggattccacttaaa

SEQ ID NO: 9958 - DNA, 21 bp, Homo sapiens
cagctcattgtttacaggcaa

SEQ ID NO: 9959 - DNA, 21 bp, Homo sapiens
cccaattaataggatagctta

SEQ ID NO: 9960 - DNA, 21 bp, Homo sapiens
tgcactattataaactattaa

SEQ ID NO: 9961 - DNA, 21 bp, Homo sapiens
aagtaagtgcttaagtattaa

SEQ ID NO: 9962 - DNA, 21 bp, Homo sapiens
atcgggtgcaatactagctaa

SEQ ID NO: 9963 - DNA, 21 bp, Homo sapiens
tcagatatcttgagacaagaa

SEQ ID NO: 9964 - DNA, 21 bp, Homo sapiens
ctcatagaaactggaggcaaa

SEQ ID NO: 9965 - DNA, 21 bp, Homo sapiens
tagaagcatattggaactgat

SEQ ID NO: 9966 - DNA, 21 bp, Homo sapiens
caggagagtgtgcctatttga

SEQ ID NO: 9967 - DNA, 21 bp, Homo sapiens
caagctcaagcaggaactcaa

SEQ ID NO: 9968 - DNA, 21 bp, Homo sapiens
cactctggttcagatcatcaa

SEQ ID NO: 9969 - DNA, 21 bp, Homo sapiens
cagggagaagttctgctatga

SEQ ID NO: 9970 - DNA, 21 bp, Homo sapiens
gaggtgctcaattaaacatta

SEQ ID NO: 9971 - DNA, 21 bp, Homo sapiens
tacgtacattacaatgagtat

SEQ ID NO: 9972 - DNA, 21 bp, Homo sapiens
tggcaatcatgtggtcatgaa

SEQ ID NO: 9973 - DNA, 21 bp, Homo sapiens
caggtggatgtagagatcaaa

SEQ ID NO: 9974 - DNA, 21 bp, Homo sapiens
caccacagacaccagatatta

SEQ ID NO: 9975 - DNA, 21 bp, Homo sapiens
ctggtagatagaagagctaaa

SEQ ID NO: 9976 - DNA, 21 bp, Homo sapiens
ctgaatgtatctcctagctat

SEQ ID NO: 9977 - DNA, 21 bp, Homo sapiens
cacagggagtgtgacacttaa

SEQ ID NO: 9978 - DNA, 21 bp, Homo sapiens
ctgcacattatggagcattaa

SEQ ID NO: 9979 - DNA, 21 bp, Homo sapiens
atgcttcagattcaagtgctt

SEQ ID NO: 9980 - DNA, 21 bp, Homo sapiens
atgatagcagagtaccttcaa

SEQ ID NO: 9981 - DNA, 21 bp, Homo sapiens
cagggtctctttagatagcaa

SEQ ID NO: 9982 - DNA, 21 bp, Homo sapiens
ctgtcagatattagaattgaa

SEQ ID NO: 9983 - DNA, 21 bp, Homo sapiens
ctgctggtcttcccaggccaa

SEQ ID NO: 9984 - DNA, 21 bp, Homo sapiens
aatattcaacatgtcaacaaa

SEQ ID NO: 9985 - DNA, 21 bp, Homo sapiens
tgggttaataatattcaacat

SEQ ID NO: 9986 - DNA, 21 bp, Homo sapiens
aaatgggttaataatattcaa

SEQ ID NO: 9987 - DNA, 21 bp, Homo sapiens
agggatgaagaacgaaagcaa

SEQ ID NO: 9988 - DNA, 21 bp, Homo sapiens
ctgcactgtttaacaaatgaa

SEQ ID NO: 9989 - DNA, 21 bp, Homo sapiens
tgggattatgttgtagtttaa

SEQ ID NO: 9990 - DNA, 21 bp, Homo sapiens
ccggaattgaaagcaaattta

SEQ ID NO: 9991 - DNA, 21 bp, Homo sapiens
aagcaccttggtcatggatta

SEQ ID NO: 9992 - DNA, 21 bp, Homo sapiens
cagctttgaaggttctatcaa

SEQ ID NO: 9993 - DNA, 21 bp, Homo sapiens
aagcctcatgacactctccaa

SEQ ID NO: 9994 - DNA, 21 bp, Homo sapiens
ccgagtgatggtggactccaa

SEQ ID NO: 9995 - DNA, 21 bp, Homo sapiens
cagcggtgcagtcccgccaaa

SEQ ID NO: 9996 - DNA, 21 bp, Homo sapiens
gagagtctatatgcagagtaa

SEQ ID NO: 9997 - DNA, 21 bp, Homo sapiens
ctcactggatcgtatctacaa

SEQ ID NO: 9998 - DNA, 21 bp, Homo sapiens
aaggttcttctaccgcatcta

SEQ ID NO: 9999 - DNA, 21 bp, Homo sapiens
ccgcggcttcctgtacttcaa

SEQ ID NO: 10000 - DNA, 21 bp, Homo sapiens
caagatggtcatctccctcaa

SEQ ID NO: 10001 - DNA, 21 bp, Homo sapiens
cggcaaacactgctaaattta

SEQ ID NO: 10002 - DNA, 21 bp, Homo sapiens
caggttgggacatttagacaa

SEQ ID NO: 10003 - DNA, 21 bp, Homo sapiens
ttcatgtagatcaccagtcaa

SEQ ID NO: 10004 - DNA, 21 bp, Homo sapiens
cccggcatttacgccctggaa

SEQ ID NO: 10005 - DNA, 21 bp, Homo sapiens
aactttgggaataaatggcaa

SEQ ID NO: 10006 - DNA, 21 bp, Homo sapiens
tcccgcgacgctcaccctgaa

SEQ ID NO: 10007 - DNA, 21 bp, Homo sapiens
ccgagtggacctgccaatcaa

SEQ ID NO: 10008 - DNA, 21 bp, Homo sapiens
aaggtgaataagtgacaaata

SEQ ID NO: 10009 - DNA, 21 bp, Homo sapiens
cgcgctgagaaccatggatta

SEQ ID NO: 10010 - DNA, 21 bp, Homo sapiens
acgtttcagattgaccctcaa

SEQ ID NO: 10011 - DNA, 21 bp, Homo sapiens
accaagcattctagaaaggta

SEQ ID NO: 10012 - DNA, 21 bp, Homo sapiens
ctcggccttgtccatatgaaa

SEQ ID NO: 10013 - DNA, 21 bp, Homo sapiens
caggattgccgggtactacta

SEQ ID NO: 10014 - DNA, 21 bp, Homo sapiens
taccaatttctcgttcctgaa

SEQ ID NO: 10015 - DNA, 21 bp, Homo sapiens
ctgggtcaccatcgagatcaa

SEQ ID NO: 10016 - DNA, 21 bp, Homo sapiens
acggaccattcccgccaagaa

SEQ ID NO: 10017 - DNA, 21 bp, Homo sapiens
tggctcggagtctttattata

SEQ ID NO: 10018 - DNA, 21 bp, Homo sapiens
ctgagctagactcctaatcta

SEQ ID NO: 10019 - DNA, 21 bp, Homo sapiens
caaggctagatgaacagtgta

SEQ ID NO: 10020 - DNA, 21 bp, Homo sapiens
caagctggtgctgccgcttta

SEQ ID NO: 10021 - DNA, 21 bp, Homo sapiens
cagcctgatccagtcttctta

SEQ ID NO: 10022 - DNA, 21 bp, Homo sapiens
caggcatgtcctcatccataa

SEQ ID NO: 10023 - DNA, 21 bp, Homo sapiens
ccactgcaaaccggcactgaa

SEQ ID NO: 10024 - DNA, 21 bp, Homo sapiens
aactcacttcctctttataaa

SEQ ID NO: 10025 - DNA, 21 bp, Homo sapiens
aagcatgtggttgatgtcaca

SEQ ID NO: 10026 - DNA, 21 bp, Homo sapiens
aaggctaaccagcgaaatata

SEQ ID NO: 10027 - DNA, 21 bp, Homo sapiens
cccggtcatcattgtgggtaa

SEQ ID NO: 10028 - DNA, 21 bp, Homo sapiens
cagaagcaggtcccaaataaa

SEQ ID NO: 10029 - DNA, 21 bp, Homo sapiens
ctggagattattaattgatca

SEQ ID NO: 10030 - DNA, 21 bp, Homo sapiens
caggaacagaataccactaaa

SEQ ID NO: 10031 - DNA, 21 bp, Homo sapiens
ccgaatctatagaataaagta

SEQ ID NO: 10032 - DNA, 21 bp, Homo sapiens
caccactgaattcatgtaata

SEQ ID NO: 10033 - DNA, 21 bp, Homo sapiens
accaaccatcattaatgttaa

SEQ ID NO: 10034 - DNA, 21 bp, Homo sapiens
aacctgtggattatcaagaaa

SEQ ID NO: 10035 - DNA, 21 bp, Homo sapiens
aacgaagagagtctttcttaa

SEQ ID NO: 10036 - DNA, 21 bp, Homo sapiens
ttggagtagaatggcaactaa

SEQ ID NO: 10037 - DNA, 21 bp, Homo sapiens
aggcgagaagaggtgaatcaa

SEQ ID NO: 10038 - DNA, 21 bp, Homo sapiens
aacatggatactagtgccgta

SEQ ID NO: 10039 - DNA, 21 bp, Homo sapiens
tcggtggaggagggagtcaaa

SEQ ID NO: 10040 - DNA, 21 bp, Homo sapiens
ccggttgacttctctgctaga

SEQ ID NO: 10041 - DNA, 21 bp, Homo sapiens
cacgtaggacagggtcacaaa

SEQ ID NO: 10042 - DNA, 21 bp, Homo sapiens
ctgcctcatcaatgacttcaa

SEQ ID NO: 10043 - DNA, 21 bp, Homo sapiens
ttcggtttctcctgatacaaa

SEQ ID NO: 10044 - DNA, 21 bp, Homo sapiens
ttatgtgtaattaatctataa

SEQ ID NO: 10045 - DNA, 21 bp, Homo sapiens
cacactttgcactactcataa

SEQ ID NO: 10046 - DNA, 21 bp, Homo sapiens
caaagggatagccatatgaaa

SEQ ID NO: 10047 - DNA, 21 bp, Homo sapiens
ccggtggtacccagaagtgaa

SEQ ID NO: 10048 - DNA, 21 bp, Homo sapiens
aacctgcaagtgaaaggcaaa

SEQ ID NO: 10049 - DNA, 21 bp, Homo sapiens
tcgagagagagccaagttcaa

SEQ ID NO: 10050 - DNA, 21 bp, Homo sapiens
caagttcaaacgcaagtacaa

SEQ ID NO: 10051 - DNA, 21 bp, Homo sapiens
ctgacaaagaagagaaccaaa

SEQ ID NO: 10052 - DNA, 21 bp, Homo sapiens
ccggagcttcctacaatccat

SEQ ID NO: 10053 - DNA, 21 bp, Homo sapiens
cccgcagaacctgacgttcat

SEQ ID NO: 10054 - DNA, 21 bp, Homo sapiens
caggccatgctcaataaatat

SEQ ID NO: 10055 - DNA, 21 bp, Homo sapiens
cgggctcaagctcaagatcaa

SEQ ID NO: 10056 - DNA, 21 bp, Homo sapiens
ccgcatcgggctcaagctcaa

SEQ ID NO: 10057 - DNA, 21 bp, Homo sapiens
cccgagcatctctctctgtaa

SEQ ID NO: 10058 - DNA, 21 bp, Homo sapiens
atcgtgcaggataaactcaaa

SEQ ID NO: 10059 - DNA, 21 bp, Homo sapiens
cctggagatggtcaccatgaa

SEQ ID NO: 10060 - DNA, 21 bp, Homo sapiens
ccgctcctgtgttgatgtgaa

SEQ ID NO: 10061 - DNA, 21 bp, Homo sapiens
ccgctccgctgccgtcatcaa

SEQ ID NO: 10062 - DNA, 21 bp, Homo sapiens
cacggaatgcacagatggcta

SEQ ID NO: 10063 - DNA, 21 bp, Homo sapiens
ccgcgtgaggactacgcgcta

SEQ ID NO: 10064 - DNA, 21 bp, Homo sapiens
acctgttgtggtccaagttta

SEQ ID NO: 10065 - DNA, 21 bp, Homo sapiens
ccgcctggacccaactgtcaa

SEQ ID NO: 10066 - DNA, 21 bp, Homo sapiens
aacaaatacacgtatgttata

SEQ ID NO: 10067 - DNA, 21 bp, Homo sapiens
aagcagcaaatccacactaaa

SEQ ID NO: 10068 - DNA, 21 bp, Homo sapiens
taggagtatctgcttgttaaa

SEQ ID NO: 10069 - DNA, 21 bp, Homo sapiens
ccgcacgactttcaccacgta

SEQ ID NO: 10070 - DNA, 21 bp, Homo sapiens
ccgcgaggagctggccggcaa

SEQ ID NO: 10071 - DNA, 21 bp, Homo sapiens
caggctgaagctcctaaactt

SEQ ID NO: 10072 - DNA, 21 bp, Homo sapiens
ccagataaccataacagggaa

SEQ ID NO: 10073 - DNA, 21 bp, Homo sapiens
aactaagtacgttgcaaataa

SEQ ID NO: 10074 - DNA, 21 bp, Homo sapiens
tacgttgcaaataatagtaca

SEQ ID NO: 10075 - DNA, 21 bp, Homo sapiens
tcggaccaagatcaaaccaaa

SEQ ID NO: 10076 - DNA, 21 bp, Homo sapiens
cacgggcaaagtgccctgtaa

SEQ ID NO: 10077 - DNA, 21 bp, Homo sapiens
aagctgggctgtgagcccaaa

SEQ ID NO: 10078 - DNA, 21 bp, Homo sapiens
ctgggcacctacaaccgcaaa

SEQ ID NO: 10079 - DNA, 21 bp, Homo sapiens
caagtccgccctgcagtacaa

SEQ ID NO: 10080 - DNA, 21 bp, Homo sapiens
aaccgcaaatatgcccattat

SEQ ID NO: 10081 - DNA, 21 bp, Homo sapiens
taggtcagtgtaagaattaaa

SEQ ID NO: 10082 - DNA, 21 bp, Homo sapiens
ttgcttgatatagactgctaa

SEQ ID NO: 10083 - DNA, 21 bp, Homo sapiens
acgggtttgattatttagtca

SEQ ID NO: 10084 - DNA, 21 bp, Homo sapiens
aagcatggtgatgatatagga

SEQ ID NO: 10085 - DNA, 21 bp, Homo sapiens
cccggctgaccaacattcaaa

SEQ ID NO: 10086 - DNA, 21 bp, Homo sapiens
tccaggaacattcccacataa

SEQ ID NO: 10087 - DNA, 21 bp, Homo sapiens
caggaacattcccacataata

SEQ ID NO: 10088 - DNA, 21 bp, Homo sapiens
cccacataatacattccatca

SEQ ID NO: 10089 - DNA, 21 bp, Homo sapiens
accactgtgttccaccatata

SEQ ID NO: 10090 - DNA, 21 bp, Homo sapiens
ccactgggaagcaaagtttaa

SEQ ID NO: 10091 - DNA, 21 bp, Homo sapiens
cacgaacaggccaatgttgaa

SEQ ID NO: 10092 - DNA, 21 bp, Homo sapiens
aagaagaaatttcgcaattaa

SEQ ID NO: 10093 - DNA, 21 bp, Homo sapiens
cagctttgaagaaccaaatta

SEQ ID NO: 10094 - DNA, 21 bp, Homo sapiens
cccaagttgacaagaactcaa

SEQ ID NO: 10095 - DNA, 21 bp, Homo sapiens
ccgaaagttctactactatga

SEQ ID NO: 10096 - DNA, 21 bp, Homo sapiens
accaaattaagctaccatgaa

SEQ ID NO: 10097 - DNA, 21 bp, Homo sapiens
cactttatatacattattcta

SEQ ID NO: 10098 - DNA, 21 bp, Homo sapiens
ctggtggtggatcccaagaaa

SEQ ID NO: 10099 - DNA, 21 bp, Homo sapiens
cagcgtcacctttgaagtata

SEQ ID NO: 10100 - DNA, 21 bp, Homo sapiens
caggctggtgctggagagtaa

SEQ ID NO: 10101 - DNA, 21 bp, Homo sapiens
tcccgggagaatcacgagcaa

SEQ ID NO: 10102 - DNA, 21 bp, Homo sapiens
tccctggagtctacacctata

SEQ ID NO: 10103 - DNA, 21 bp, Homo sapiens
tgggaacttcttggaacttta

SEQ ID NO: 10104 - DNA, 21 bp, Homo sapiens
tgcaatagtctggaataaata

SEQ ID NO: 10105 - DNA, 21 bp, Homo sapiens
tacaaagaaagtagaatgtaa

SEQ ID NO: 10106 - DNA, 21 bp, Homo sapiens
ctgcaggaatctctagtttaa

SEQ ID NO: 10107 - DNA, 21 bp, Homo sapiens
aagggcttatggactgagaaa

SEQ ID NO: 10108 - DNA, 21 bp, Homo sapiens
aaggagcaggccataacttta

SEQ ID NO: 10109 - DNA, 21 bp, Homo sapiens
gagcagttcagtggtacataa

SEQ ID NO: 10110 - DNA, 21 bp, Homo sapiens
aaccaggaggttatcatggta

SEQ ID NO: 10111 - DNA, 21 bp, Homo sapiens
cccgcagagctgagaagttat

SEQ ID NO: 10112 - DNA, 21 bp, Homo sapiens
cagaacagcatcagaggacta

SEQ ID NO: 10113 - DNA, 21 bp, Homo sapiens
ttgagttatgagttaggtcaa

SEQ ID NO: 10114 - DNA, 21 bp, Homo sapiens
cagctttgaccttcttagcaa

SEQ ID NO: 10115 - DNA, 21 bp, Homo sapiens
cacatgtctcatcaagactta

SEQ ID NO: 10116 - DNA, 21 bp, Homo sapiens
ccggaacaagattctgcacaa

SEQ ID NO: 10117 - DNA, 21 bp, Homo sapiens
cgcagactttgtgttgctgaa

SEQ ID NO: 10118 - DNA, 21 bp, Homo sapiens
cacgtacgggcgcatcattaa

SEQ ID NO: 10119 - DNA, 21 bp, Homo sapiens
ctcggtgacctcagagagtga

SEQ ID NO: 10120 - DNA, 21 bp, Homo sapiens
ccaggatgactttgcacgtta

SEQ ID NO: 10121 - DNA, 21 bp, Homo sapiens
accctggattctgaaattaaa

SEQ ID NO: 10122 - DNA, 21 bp, Homo sapiens
caggatgactttgcacgttaa

SEQ ID NO: 10123 - DNA, 21 bp, Homo sapiens
cagcatagtgagaattattta

SEQ ID NO: 10124 - DNA, 21 bp, Homo sapiens
ccgcaacaagttcacccagaa

SEQ ID NO: 10125 - DNA, 21 bp, Homo sapiens
cgaggagtcagtagcaatcaa

SEQ ID NO: 10126 - DNA, 21 bp, Homo sapiens
ctccatatgctgcaagattta

SEQ ID NO: 10127 - DNA, 21 bp, Homo sapiens
caagatttagttagtacaaat

SEQ ID NO: 10128 - DNA, 21 bp, Homo sapiens
ttgagatgcaattacacccaa

SEQ ID NO: 10129 - DNA, 21 bp, Homo sapiens
cccggagatgagggtctacaa

SEQ ID NO: 10130 - DNA, 21 bp, Homo sapiens
caccaggaagccctacaacaa

SEQ ID NO: 10131 - DNA, 21 bp, Homo sapiens
cccggtcatctttcagaccca

SEQ ID NO: 10132 - DNA, 21 bp, Homo sapiens
ctgcaagaagtccatattgtt

SEQ ID NO: 10133 - DNA, 21 bp, Homo sapiens
ccagagcagaccctcaataaa

SEQ ID NO: 10134 - DNA, 21 bp, Homo sapiens
acctgttgaaatgtgaattaa

SEQ ID NO: 10135 - DNA, 21 bp, Homo sapiens
ctgataggttccagccttata

SEQ ID NO: 10136 - DNA, 21 bp, Homo sapiens
cctgcgttagttacaaaggaa

SEQ ID NO: 10137 - DNA, 21 bp, Homo sapiens
aaggtagactttctaagcata

SEQ ID NO: 10138 - DNA, 21 bp, Homo sapiens
aacatgtttatttgacctcaa

SEQ ID NO: 10139 - DNA, 21 bp, Homo sapiens
ccgccatatggaagtgtgcta

SEQ ID NO: 10140 - DNA, 21 bp, Homo sapiens
cagccagaacgcgacgctcta

SEQ ID NO: 10141 - DNA, 21 bp, Homo sapiens
caccgcaagttagaacagcta

SEQ ID NO: 10142 - DNA, 21 bp, Homo sapiens
cagcctggactttacagttat

SEQ ID NO: 10143 - DNA, 21 bp, Homo sapiens
aaggttggccttggctcataa

SEQ ID NO: 10144 - DNA, 21 bp, Homo sapiens
caagccagaaaccacatttaa

SEQ ID NO: 10145 - DNA, 21 bp, Homo sapiens
ccgcgacgtgttgtactacaa

SEQ ID NO: 10146 - DNA, 21 bp, Homo sapiens
cacatttaatttcataaataa

SEQ ID NO: 10147 - DNA, 21 bp, Homo sapiens
cagggtgtcatcttcaacgat

SEQ ID NO: 10148 - DNA, 21 bp, Homo sapiens
aaggatgaacagactcttcat

SEQ ID NO: 10149 - DNA, 21 bp, Homo sapiens
cagctgtctctgggaaagcaa

SEQ ID NO: 10150 - DNA, 21 bp, Homo sapiens
cacaccagcaatgtatgtata

SEQ ID NO: 10151 - DNA, 21 bp, Homo sapiens
gaggaataagtcattaatcta

SEQ ID NO: 10152 - DNA, 21 bp, Homo sapiens
cagctgaattcttgcccttaa

SEQ ID NO: 10153 - DNA, 21 bp, Homo sapiens
ctccctagttagacacaccaa

SEQ ID NO: 10154 - DNA, 21 bp, Homo sapiens
ccaggtactttcaaacagtta

SEQ ID NO: 10155 - DNA, 21 bp, Homo sapiens
tggattcattgtactagttaa

SEQ ID NO: 10156 - DNA, 21 bp, Homo sapiens
ctggctgaagctaaagatcaa

SEQ ID NO: 10157 - DNA, 21 bp, Homo sapiens
atggctctcctgaccaatcta

SEQ ID NO: 10158 - DNA, 21 bp, Homo sapiens
tcggtcaaagctgataactca

SEQ ID NO: 10159 - DNA, 21 bp, Homo sapiens
accgagtggcctccacgcaaa

SEQ ID NO: 10160 - DNA, 21 bp, Homo sapiens
cccaggcatagaaacctcgaa

SEQ ID NO: 10161 - DNA, 21 bp, Homo sapiens
aaggttgagatgacaatgttt

SEQ ID NO: 10162 - DNA, 21 bp, Homo sapiens
atcagtatttcaaataactta

SEQ ID NO: 10163 - DNA, 21 bp, Homo sapiens
aagcatgaatgcgttctggaa

SEQ ID NO: 10164 - DNA, 21 bp, Homo sapiens
aaggatggagatgagcaacta

SEQ ID NO: 10165 - DNA, 21 bp, Homo sapiens
cacgtagtaaagtgaacttaa

SEQ ID NO: 10166 - DNA, 21 bp, Homo sapiens
ttcaatcaaatgaacaattaa

SEQ ID NO: 10167 - DNA, 21 bp, Homo sapiens
atcacggatcatgaatttata

SEQ ID NO: 10168 - DNA, 21 bp, Homo sapiens
ttggtgagtaacacacatata

SEQ ID NO: 10169 - DNA, 21 bp, Homo sapiens
cactgataaattgtgcaataa

SEQ ID NO: 10170 - DNA, 21 bp, Homo sapiens
ctcgatttccttatatctaat

SEQ ID NO: 10171 - DNA, 21 bp, Homo sapiens
gaggatggagtcacaagtata

SEQ ID NO: 10172 - DNA, 21 bp, Homo sapiens
aaggttggtagttatgtggaa

SEQ ID NO: 10173 - DNA, 21 bp, Homo sapiens
tcaggcattcatctaaataaa

SEQ ID NO: 10174 - DNA, 21 bp, Homo sapiens
aaggaaattcgtgtacttgaa

SEQ ID NO: 10175 - DNA, 21 bp, Homo sapiens
taccaacatcttgaatatata

SEQ ID NO: 10176 - DNA, 21 bp, Homo sapiens
agggattctaatatttattta

SEQ ID NO: 10177 - DNA, 21 bp, Homo sapiens
aaggctaggttcattgaataa

SEQ ID NO: 10178 - DNA, 21 bp, Homo sapiens
ccagatgaaattgctgcctta

SEQ ID NO: 10179 - DNA, 21 bp, Homo sapiens
ctgatgtaatttagaaatgaa

SEQ ID NO: 10180 - DNA, 21 bp, Homo sapiens
aacgatttcttcagcctgaaa

SEQ ID NO: 10181 - DNA, 21 bp, Homo sapiens
cagagggttctggaagatgaa

SEQ ID NO: 10182 - DNA, 21 bp, Homo sapiens
cccggaaagctttcctgcaaa

SEQ ID NO: 10183 - DNA, 21 bp, Homo sapiens
cccagtcttcttggaaattca

SEQ ID NO: 10184 - DNA, 21 bp, Homo sapiens
atgggaggagctgcaactata

SEQ ID NO: 10185 - DNA, 21 bp, Homo sapiens
aaagcttaatttgcccattaa

SEQ ID NO: 10186 - DNA, 21 bp, Homo sapiens
aagcttaatttgcccattaat

SEQ ID NO: 10187 - DNA, 21 bp, Homo sapiens
ctacgtgatctgcacctttaa

SEQ ID NO: 10188 - DNA, 21 bp, Homo sapiens
aagggaatattgaggaatcat

SEQ ID NO: 10189 - DNA, 21 bp, Homo sapiens
aacaattaagccgaccaggaa

SEQ ID NO: 10190 - DNA, 21 bp, Homo sapiens
aagtgtaaatcagttattcta

SEQ ID NO: 10191 - DNA, 21 bp, Homo sapiens
acgcctcaaggtctcagggaa

SEQ ID NO: 10192 - DNA, 21 bp, Homo sapiens
tcccgagagcctagatattaa

SEQ ID NO: 10193 - DNA, 21 bp, Homo sapiens
cccgagagcctagatattaaa

SEQ ID NO: 10194 - DNA, 21 bp, Homo sapiens
acagcagaagctaacaattta

SEQ ID NO: 10195 - DNA, 21 bp, Homo sapiens
cagcatgaagataatggctaa

SEQ ID NO: 10196 - DNA, 21 bp, Homo sapiens
cagaatacacttcgtatcaaa

SEQ ID NO: 10197 - DNA, 21 bp, Homo sapiens
caggatgacgcggcatggcaa

SEQ ID NO: 10198 - DNA, 21 bp, Homo sapiens
cccgtgcacttcacaccgcta

SEQ ID NO: 10199 - DNA, 21 bp, Homo sapiens
caggatgaaggtagaactata

SEQ ID NO: 10200 - DNA, 21 bp, Homo sapiens
cagaatattccctaaaggtaa

SEQ ID NO: 10201 - DNA, 21 bp, Homo sapiens
aaccatagatacaacattgaa

SEQ ID NO: 10202 - DNA, 21 bp, Homo sapiens
aaggaagtatgcgaccatgaa

SEQ ID NO: 10203 - DNA, 21 bp, Homo sapiens
cagcttgattgcatttgacta

SEQ ID NO: 10204 - DNA, 21 bp, Homo sapiens
cagccagtgattgtagtttca

SEQ ID NO: 10205 - DNA, 21 bp, Homo sapiens
acgcagagatctcactataaa

SEQ ID NO: 10206 - DNA, 21 bp, Homo sapiens
aaggatttgggtggaactgaa

SEQ ID NO: 10207 - DNA, 21 bp, Homo sapiens
cagcttataagttgctatcaa

SEQ ID NO: 10208 - DNA, 21 bp, Homo sapiens
aagaaatgtatcaaatctgaa

SEQ ID NO: 10209 - DNA, 21 bp, Homo sapiens
aaggcctgatttcaaacgaaa

SEQ ID NO: 10210 - DNA, 21 bp, Homo sapiens
tacgtctatatcacaccttaa

SEQ ID NO: 10211 - DNA, 21 bp, Homo sapiens
ccaggtgtgcttacaaacaaa

SEQ ID NO: 10212 - DNA, 21 bp, Homo sapiens
caggtaaagtgtcttcaagta

SEQ ID NO: 10213 - DNA, 21 bp, Homo sapiens
atggctaagtggataatttaa

SEQ ID NO: 10214 - DNA, 21 bp, Homo sapiens
tccgttgatcttagtggtgaa

SEQ ID NO: 10215 - DNA, 21 bp, Homo sapiens
cagctgaagattggaatacta

SEQ ID NO: 10216 - DNA, 21 bp, Homo sapiens
acggaaatttagggtatttaa

SEQ ID NO: 10217 - DNA, 21 bp, Homo sapiens
caggctggcactactagtgaa

SEQ ID NO: 10218 - DNA, 21 bp, Homo sapiens
atccagggagatgcagttaaa

SEQ ID NO: 10219 - DNA, 21 bp, Homo sapiens
cacgacatcatcgacctggaa

SEQ ID NO: 10220 - DNA, 21 bp, Homo sapiens
cacgctcaacaacatctttga

SEQ ID NO: 10221 - DNA, 21 bp, Homo sapiens
aaagaagaacttattgagaaa

SEQ ID NO: 10222 - DNA, 21 bp, Homo sapiens
gagggtcaccatgaagttcaa

SEQ ID NO: 10223 - DNA, 21 bp, Homo sapiens
aacgcttggattctacagcaa

SEQ ID NO: 10224 - DNA, 21 bp, Homo sapiens
acccatctttgtcgtttggaa

SEQ ID NO: 10225 - DNA, 21 bp, Homo sapiens
tacggtctgacagttatatta

SEQ ID NO: 10226 - DNA, 21 bp, Homo sapiens
ctgaggatgtatgaagttcca

SEQ ID NO: 10227 - DNA, 21 bp, Homo sapiens
caccgtgggatgtgatttaaa

SEQ ID NO: 10228 - DNA, 21 bp, Homo sapiens
atggagttcgaggaatttata

SEQ ID NO: 10229 - DNA, 21 bp, Homo sapiens
gagatcttatgtcaagttcta

SEQ ID NO: 10230 - DNA, 21 bp, Homo sapiens
acagcccatgatagcctctta

SEQ ID NO: 10231 - DNA, 21 bp, Homo sapiens
gtccattattagattatgtta

SEQ ID NO: 10232 - DNA, 21 bp, Homo sapiens
cagcttagaagagtactccaa

SEQ ID NO: 10233 - DNA, 21 bp, Homo sapiens
ttgcaggacagtggttattaa

SEQ ID NO: 10234 - DNA, 21 bp, Homo sapiens
atcctattagtcatatattta

SEQ ID NO: 10235 - DNA, 21 bp, Homo sapiens
caggaagtacaagcatttaaa

SEQ ID NO: 10236 - DNA, 21 bp, Homo sapiens
cagaatgaatcaaccaatgaa

SEQ ID NO: 10237 - DNA, 21 bp, Homo sapiens
aggagtggacagtgcaatgaa

SEQ ID NO: 10238 - DNA, 21 bp, Homo sapiens
cagcacctaccgaaccatcta

SEQ ID NO: 10239 - DNA, 21 bp, Homo sapiens
caagctatgattggttccaaa

SEQ ID NO: 10240 - DNA, 21 bp, Homo sapiens
ttaaggattgtttatatctta

SEQ ID NO: 10241 - DNA, 21 bp, Homo sapiens
aggcttcacaccaatggttaa

SEQ ID NO: 10242 - DNA, 21 bp, Homo sapiens
tcgatcatgtttccatgcaaa

SEQ ID NO: 10243 - DNA, 21 bp, Homo sapiens
caagattagatttgaacggaa

SEQ ID NO: 10244 - DNA, 21 bp, Homo sapiens
caggatcgtgtttcaggccaa

SEQ ID NO: 10245 - DNA, 21 bp, Homo sapiens
ccggtcggtcgctgagatcaa

SEQ ID NO: 10246 - DNA, 21 bp, Homo sapiens
caggaggatcacaaactcaca

SEQ ID NO: 10247 - DNA, 21 bp, Homo sapiens
cgcgagccatgatgaaattaa

SEQ ID NO: 10248 - DNA, 21 bp, Homo sapiens
atccctattggtgcagctata

SEQ ID NO: 10249 - DNA, 21 bp, Homo sapiens
aatggattacgtgatatatta

SEQ ID NO: 10250 - DNA, 21 bp, Homo sapiens
ctctattgagatagcatctta

SEQ ID NO: 10251 - DNA, 21 bp, Homo sapiens
ttggacctagataacaagtaa

SEQ ID NO: 10252 - DNA, 21 bp, Homo sapiens
cagcctcatgcctgaatcaaa

SEQ ID NO: 10253 - DNA, 21 bp, Homo sapiens
cagcatttgtatagtaactaa

SEQ ID NO: 10254 - DNA, 21 bp, Homo sapiens
ccctttgttaatgttatagaa

SEQ ID NO: 10255 - DNA, 21 bp, Homo sapiens
ccggacgccgaaatgcattaa

SEQ ID NO: 10256 - DNA, 21 bp, Homo sapiens
accatttgagtatgacaacta

SEQ ID NO: 10257 - DNA, 21 bp, Homo sapiens
gaggagaatggtaatgttcaa

SEQ ID NO: 10258 - DNA, 21 bp, Homo sapiens
tggaagtagcataactgtcaa

SEQ ID NO: 10259 - DNA, 21 bp, Homo sapiens
cagctacaactttgaagttaa

SEQ ID NO: 10260 - DNA, 21 bp, Homo sapiens
gaggagattcttggaaatata

SEQ ID NO: 10261 - DNA, 21 bp, Homo sapiens
acggagaaacttcaatattca

SEQ ID NO: 10262 - DNA, 21 bp, Homo sapiens
cccattgctccttcaagccaa

SEQ ID NO: 10263 - DNA, 21 bp, Homo sapiens
acggtggaactaaagattcca

SEQ ID NO: 10264 - DNA, 21 bp, Homo sapiens
acccaaagctctggaattgta

SEQ ID NO: 10265 - DNA, 21 bp, Homo sapiens
ctggaagaatatcgtgcacaa

SEQ ID NO: 10266 - DNA, 21 bp, Homo sapiens
ctggaagacctaagaaatgta

SEQ ID NO: 10267 - DNA, 21 bp, Homo sapiens
gaggccaaacttgaaatacaa

SEQ ID NO: 10268 - DNA, 21 bp, Homo sapiens
gtgcctttatacaatgccaaa

SEQ ID NO: 10269 - DNA, 21 bp, Homo sapiens
cccgctggacatgttcttgaa

SEQ ID NO: 10270 - DNA, 21 bp, Homo sapiens
ccatgtcagtttataccttaa

SEQ ID NO: 10271 - DNA, 21 bp, Homo sapiens
caggtggacacaggtgccaaa

SEQ ID NO: 10272 - DNA, 21 bp, Homo sapiens
acccaattcagagattcttta

SEQ ID NO: 10273 - DNA, 21 bp, Homo sapiens
tcagtccatctctataataaa

SEQ ID NO: 10274 - DNA, 21 bp, Homo sapiens
accctgagatgtaaacagcaa

SEQ ID NO: 10275 - DNA, 21 bp, Homo sapiens
aaggatgagcagacaagtcaa

SEQ ID NO: 10276 - DNA, 21 bp, Homo sapiens
cccaacttggctagtaataaa

SEQ ID NO: 10277 - DNA, 21 bp, Homo sapiens
caggcggtggacgctgctgaa

SEQ ID NO: 10278 - DNA, 21 bp, Homo sapiens
ctcaatctgcccaaagccaaa

SEQ ID NO: 10279 - DNA, 21 bp, Homo sapiens
cccaataaacaggtgtcttaa

SEQ ID NO: 10280 - DNA, 21 bp, Homo sapiens
caagggagtcacagtgcctta

SEQ ID NO: 10281 - DNA, 21 bp, Homo sapiens
cacaaagaaactataccataa

SEQ ID NO: 10282 - DNA, 21 bp, Homo sapiens
atggttgagaacaatgcataa

SEQ ID NO: 10283 - DNA, 21 bp, Homo sapiens
caggactacggagttcgagaa

SEQ ID NO: 10284 - DNA, 21 bp, Homo sapiens
aaggcagagaccaaacttcat

SEQ ID NO: 10285 - DNA, 21 bp, Homo sapiens
tggacagatgatcatattcta

SEQ ID NO: 10286 - DNA, 21 bp, Homo sapiens
ctgggccgagtgaagcattta

SEQ ID NO: 10287 - DNA, 21 bp, Homo sapiens
ccgggtgtgtttgcactacta

SEQ ID NO: 10288 - DNA, 21 bp, Homo sapiens
acgctttgtgaaccaattaaa

SEQ ID NO: 10289 - DNA, 21 bp, Homo sapiens
aagggccatgttcggagtgta

SEQ ID NO: 10290 - DNA, 21 bp, Homo sapiens
gacctgcacaaccttaataaa

SEQ ID NO: 10291 - DNA, 21 bp, Homo sapiens
aaggacatctttctagtctaa

SEQ ID NO: 10292 - DNA, 21 bp, Homo sapiens
aaccgggaaggctataacaaa

SEQ ID NO: 10293 - DNA, 21 bp, Homo sapiens
ctaaagcaatttcatcacgaa

SEQ ID NO: 10294 - DNA, 21 bp, Homo sapiens
agctcccgaattagtattaaa

SEQ ID NO: 10295 - DNA, 21 bp, Homo sapiens
tgggcagatagtggccattaa

SEQ ID NO: 10296 - DNA, 21 bp, Homo sapiens
caacattattgtcatggacta

SEQ ID NO: 10297 - DNA, 21 bp, Homo sapiens
aaggtggaccaactaccttaa

SEQ ID NO: 10298 - DNA, 21 bp, Homo sapiens
atacatcaccttaaatattaa

SEQ ID NO: 10299 - DNA, 21 bp, Homo sapiens
ctgacagatactgaaattgta

SEQ ID NO: 10300 - DNA, 21 bp, Homo sapiens
agggctttattgtacaataaa

SEQ ID NO: 10301 - DNA, 21 bp, Homo sapiens
caggattgtatagaatatata

SEQ ID NO: 10302 - DNA, 21 bp, Homo sapiens
aggattgtatagaatatataa

SEQ ID NO: 10303 - DNA, 21 bp, Homo sapiens
gagcataagttaagtaagtaa

SEQ ID NO: 10304 - DNA, 21 bp, Homo sapiens
ctccaccgataacctatcaaa

SEQ ID NO: 10305 - DNA, 21 bp, Homo sapiens
cagggatttctgaataatgta

SEQ ID NO: 10306 - DNA, 21 bp, Homo sapiens
ctgaattatatcctttattaa

SEQ ID NO: 10307 - DNA, 21 bp, Homo sapiens
tacgagtttgacatcaatgaa

SEQ ID NO: 10308 - DNA, 21 bp, Homo sapiens
ccgcaacaagtgtgtgtatta

SEQ ID NO: 10309 - DNA, 21 bp, Homo sapiens
caggaagggtagggcaagaaa

SEQ ID NO: 10310 - DNA, 21 bp, Homo sapiens
caaggactttgggaacatcaa

SEQ ID NO: 10311 - DNA, 21 bp, Homo sapiens
ccggatcatctccctggccaa

SEQ ID NO: 10312 - DNA, 21 bp, Homo sapiens
aaggatgaggaggacaataat

SEQ ID NO: 10313 - DNA, 21 bp, Homo sapiens
aaggatgaagtcaggtatgaa

SEQ ID NO: 10314 - DNA, 21 bp, Homo sapiens
cagcttagttccagagagaaa

SEQ ID NO: 10315 - DNA, 21 bp, Homo sapiens
caggatgttgggtttgctcaa

SEQ ID NO: 10316 - DNA, 21 bp, Homo sapiens
caggtgctgagtgaaagcgaa

SEQ ID NO: 10317 - DNA, 21 bp, Homo sapiens
caccaaggaaacagccaccta

SEQ ID NO: 10318 - DNA, 21 bp, Homo sapiens
ccggacggtgtaccagctcaa

SEQ ID NO: 10319 - DNA, 21 bp, Homo sapiens
tacggaagaacctgatagtaa

SEQ ID NO: 10320 - DNA, 21 bp, Homo sapiens
acggaagaacctgatagtaaa

SEQ ID NO: 10321 - DNA, 21 bp, Homo sapiens
accggacaagttccaaataca

SEQ ID NO: 10322 - DNA, 21 bp, Homo sapiens
accatgccaagtgaaataata

SEQ ID NO: 10323 - DNA, 21 bp, Homo sapiens
gacaactattatattccagaa

SEQ ID NO: 10324 - DNA, 21 bp, Homo sapiens
acccatgagatcggacacata

SEQ ID NO: 10325 - DNA, 21 bp, Homo sapiens
cagcattgtagaaagatacaa

SEQ ID NO: 10326 - DNA, 21 bp, Homo sapiens
cccgtggaagcctttaaggaa

SEQ ID NO: 10327 - DNA, 21 bp, Homo sapiens
cgcccactcatcattcattca

SEQ ID NO: 10328 - DNA, 21 bp, Homo sapiens
ctcagatgtcctgaaattcca

SEQ ID NO: 10329 - DNA, 21 bp, Homo sapiens
cagctgacactgactaaggaa

SEQ ID NO: 10330 - DNA, 21 bp, Homo sapiens
gagggagaatttattaataaa

SEQ ID NO: 10331 - DNA, 21 bp, Homo sapiens
ccggcgtatgttagaagagca

SEQ ID NO: 10332 - DNA, 21 bp, Homo sapiens
acgggccacattcgcaagcta

SEQ ID NO: 10333 - DNA, 21 bp, Homo sapiens
ccgggaaagattcctcaccaa

SEQ ID NO: 10334 - DNA, 21 bp, Homo sapiens
ctcagctatatatgtaataaa

SEQ ID NO: 10335 - DNA, 21 bp, Homo sapiens
ctgggcaagtattaatgtata

SEQ ID NO: 10336 - DNA, 21 bp, Homo sapiens
cccggttgcccttgcgatcaa

SEQ ID NO: 10337 - DNA, 21 bp, Homo sapiens
cacagagacattcactattaa

SEQ ID NO: 10338 - DNA, 21 bp, Homo sapiens
ccgcaggagaacaaagttgta

SEQ ID NO: 10339 - DNA, 21 bp, Homo sapiens
tcgccagatcgtcatccagaa

SEQ ID NO: 10340 - DNA, 21 bp, Homo sapiens
caggattaacgagaatgagaa

SEQ ID NO: 10341 - DNA, 21 bp, Homo sapiens
tgcagtgacgctgtcattaaa

SEQ ID NO: 10342 - DNA, 21 bp, Homo sapiens
cgggtcgatcttccacattca

SEQ ID NO: 10343 - DNA, 21 bp, Homo sapiens
cagagactgtactacgacaaa

SEQ ID NO: 10344 - DNA, 21 bp, Homo sapiens
acgcagcgagagaataaagaa

SEQ ID NO: 10345 - DNA, 21 bp, Homo sapiens
cagctcctccgtcgtgcataa

SEQ ID NO: 10346 - DNA, 21 bp, Homo sapiens
caaacagtataaagcactcaa

SEQ ID NO: 10347 - DNA, 21 bp, Homo sapiens
cccggcctcgaaggtgcataa

SEQ ID NO: 10348 - DNA, 21 bp, Homo sapiens
gcctctattattataccgtaa

SEQ ID NO: 10349 - DNA, 21 bp, Homo sapiens
taggcccatgaaattgatgaa

SEQ ID NO: 10350 - DNA, 21 bp, Homo sapiens
cagtctgaggttacaattaga

SEQ ID NO: 10351 - DNA, 21 bp, Homo sapiens
ctgcagggagtgccaagtcaa

SEQ ID NO: 10352 - DNA, 21 bp, Homo sapiens
ctgcagggtggaggacttcaa

SEQ ID NO: 10353 - DNA, 21 bp, Homo sapiens
caggacccagaataaagccaa

SEQ ID NO: 10354 - DNA, 21 bp, Homo sapiens
ccgggccagaggagaggcata

SEQ ID NO: 10355 - DNA, 21 bp, Homo sapiens
tgacatgtttatgttatggaa

SEQ ID NO: 10356 - DNA, 21 bp, Homo sapiens
ctctgtggtgtttatgaaata

SEQ ID NO: 10357 - DNA, 21 bp, Homo sapiens
tccctatttattaaagtattt

SEQ ID NO: 10358 - DNA, 21 bp, Homo sapiens
caggcttgttctggatcccta

SEQ ID NO: 10359 - DNA, 21 bp, Homo sapiens
acctcttatatagacaaccaa

SEQ ID NO: 10360 - DNA, 21 bp, Homo sapiens
aaccaaatctgtcaagggcaa

SEQ ID NO: 10361 - DNA, 21 bp, Homo sapiens
ctggaatactatcacctctta

SEQ ID NO: 10362 - DNA, 21 bp, Homo sapiens
aagccaagacttcatgaacta

SEQ ID NO: 10363 - DNA, 21 bp, Homo sapiens
aaagaagataatagagactaa

SEQ ID NO: 10364 - DNA, 21 bp, Homo sapiens
atggatgaaagagatctgtaa

SEQ ID NO: 10365 - DNA, 21 bp, Homo sapiens
aagggccacgatgacagatta

SEQ ID NO: 10366 - DNA, 21 bp, Homo sapiens
caggagaatattcttctgata

SEQ ID NO: 10367 - DNA, 21 bp, Homo sapiens
cagagagatgatatacccgaa

SEQ ID NO: 10368 - DNA, 21 bp, Homo sapiens
cagatgtttctcattgcataa

SEQ ID NO: 10369 - DNA, 21 bp, Homo sapiens
tcagataagagtcaacctcaa

SEQ ID NO: 10370 - DNA, 21 bp, Homo sapiens
ctggctgaacctgctttacta

SEQ ID NO: 10371 - DNA, 21 bp, Homo sapiens
cagaggatctttccaaccaca

SEQ ID NO: 10372 - DNA, 21 bp, Homo sapiens
ccagtgaattctggtggcaaa

SEQ ID NO: 10373 - DNA, 21 bp, Homo sapiens
acggcagcgattattagtaga

SEQ ID NO: 10374 - DNA, 21 bp, Homo sapiens
aggaaggaagtgagtctataa

SEQ ID NO: 10375 - DNA, 21 bp, Homo sapiens
aggcgatacatctgagttcaa

SEQ ID NO: 10376 - DNA, 21 bp, Homo sapiens
aacatcgagctctgttgtaaa

SEQ ID NO: 10377 - DNA, 21 bp, Homo sapiens
cagggtggcaaccaactatat

SEQ ID NO: 10378 - DNA, 21 bp, Homo sapiens
cagtaaagtattgagagacta

SEQ ID NO: 10379 - DNA, 21 bp, Homo sapiens
cagggattgattagtcctcca

SEQ ID NO: 10380 - DNA, 21 bp, Homo sapiens
atccacgttcatttaactgaa

SEQ ID NO: 10381 - DNA, 21 bp, Homo sapiens
cagggaaatgagcaagctgaa

SEQ ID NO: 10382 - DNA, 21 bp, Homo sapiens
aacgatttgaacaaagcgcta

SEQ ID NO: 10383 - DNA, 21 bp, Homo sapiens
cacctacagcaaacacgtcaa

SEQ ID NO: 10384 - DNA, 21 bp, Homo sapiens
cacggccattccagtacatga

SEQ ID NO: 10385 - DNA, 21 bp, Homo sapiens
ctggcataactacatgtgtaa

SEQ ID NO: 10386 - DNA, 21 bp, Homo sapiens
caacagcaccatggagcgcaa

SEQ ID NO: 10387 - DNA, 21 bp, Homo sapiens
aagcatattgctccaattcaa

SEQ ID NO: 10388 - DNA, 21 bp, Homo sapiens
aagggtgttagtcttggagaa

SEQ ID NO: 10389 - DNA, 21 bp, Homo sapiens
aagcgcggttatggacaccaa

SEQ ID NO: 10390 - DNA, 21 bp, Homo sapiens
cgcggttatggacaccaagaa

SEQ ID NO: 10391 - DNA, 21 bp, Homo sapiens
ccggaaagcattcctctcgaa

SEQ ID NO: 10392 - DNA, 21 bp, Homo sapiens
aagcacgagcctgaacggtta

SEQ ID NO: 10393 - DNA, 21 bp, Homo sapiens
aaggataaacccattgctgta

SEQ ID NO: 10394 - DNA, 21 bp, Homo sapiens
caaggatttacccattagaaa

SEQ ID NO: 10395 - DNA, 21 bp, Homo sapiens
taggatgggacttaatgataa

SEQ ID NO: 10396 - DNA, 21 bp, Homo sapiens
ccgggtgacgacgggtagaaa

SEQ ID NO: 10397 - DNA, 21 bp, Homo sapiens
acagatctcaatgatgcaata

SEQ ID NO: 10398 - DNA, 21 bp, Homo sapiens
cagccgctttccagtgatgta

SEQ ID NO: 10399 - DNA, 21 bp, Homo sapiens
cccatcattgttggagattat

SEQ ID NO: 10400 - DNA, 21 bp, Homo sapiens
tacccagtgtcagataattaa

SEQ ID NO: 10401 - DNA, 21 bp, Homo sapiens
ccctgagaagttcaacattta

SEQ ID NO: 10402 - DNA, 21 bp, Homo sapiens
atagtattactgactcagtaa

SEQ ID NO: 10403 - DNA, 21 bp, Homo sapiens
ccagaggaagagaccatgaaa

SEQ ID NO: 10404 - DNA, 21 bp, Homo sapiens
caccatcttcaccaacatcaa

SEQ ID NO: 10405 - DNA, 21 bp, Homo sapiens
ctgcatattgttccagataaa

SEQ ID NO: 10406 - DNA, 21 bp, Homo sapiens
caggtgatggtccagaattaa

SEQ ID NO: 10407 - DNA, 21 bp, Homo sapiens
aagcatccaaatggtaattaa

SEQ ID NO: 10408 - DNA, 21 bp, Homo sapiens
caggatggcttatatgagaaa

SEQ ID NO: 10409 - DNA, 21 bp, Homo sapiens
cacacagtaataaacggttta

SEQ ID NO: 10410 - DNA, 21 bp, Homo sapiens
cggcttaaactttgcaagtaa

SEQ ID NO: 10411 - DNA, 21 bp, Homo sapiens
caggttgtgatcaattattca

SEQ ID NO: 10412 - DNA, 21 bp, Homo sapiens
ccggatcaacatctaccacaa

SEQ ID NO: 10413 - DNA, 21 bp, Homo sapiens
cagaagctggaggcagcataa

SEQ ID NO: 10414 - DNA, 21 bp, Homo sapiens
cagcatgttccttgaagccca

SEQ ID NO: 10415 - DNA, 21 bp, Homo sapiens
aacgctgctaggagaatcgaa

SEQ ID NO: 10416 - DNA, 21 bp, Homo sapiens
tcgcaggaccctcgcaccaaa

SEQ ID NO: 10417 - DNA, 21 bp, Homo sapiens
tcgggtgactgtgcgactgaa

SEQ ID NO: 10418 - DNA, 21 bp, Homo sapiens
ccggcacacctgaaagttcta

SEQ ID NO: 10419 - DNA, 21 bp, Homo sapiens
acgaataaattgagccttgta

SEQ ID NO: 10420 - DNA, 21 bp, Homo sapiens
cagggtgggtgatgtaaatat

SEQ ID NO: 10421 - DNA, 21 bp, Homo sapiens
tcggagtaagatcaacgtcta

SEQ ID NO: 10422 - DNA, 21 bp, Homo sapiens
cgggacctcattgactatgta

SEQ ID NO: 10423 - DNA, 21 bp, Homo sapiens
ctcagttacaatcaatttaaa

SEQ ID NO: 10424 - DNA, 21 bp, Homo sapiens
aagtacagtattggaaattaa

SEQ ID NO: 10425 - DNA, 21 bp, Homo sapiens
caggaggatgattctggagaa

SEQ ID NO: 10426 - DNA, 21 bp, Homo sapiens
aagcgagtgagcatcaataaa

SEQ ID NO: 10427 - DNA, 21 bp, Homo sapiens
cagatgtgaagctcaaattaa

SEQ ID NO: 10428 - DNA, 21 bp, Homo sapiens
tgcgccactattataagctta

SEQ ID NO: 10429 - DNA, 21 bp, Homo sapiens
gcgccactattataagcttaa

SEQ ID NO: 10430 - DNA, 21 bp, Homo sapiens
cccgatatgagccctacatca

SEQ ID NO: 10431 - DNA, 21 bp, Homo sapiens
ctagctgtgttcagcattcaa

SEQ ID NO: 10432 - DNA, 21 bp, Homo sapiens
tagagaataaattgaattctt

SEQ ID NO: 10433 - DNA, 21 bp, Homo sapiens
cacaatgaaatccgaagccaa

SEQ ID NO: 10434 - DNA, 21 bp, Homo sapiens
aaggcttgtcaaagagattta

SEQ ID NO: 10435 - DNA, 21 bp, Homo sapiens
cagactttaatttacagaata

SEQ ID NO: 10436 - DNA, 21 bp, Homo sapiens
aaggtagaaggtggagctata

SEQ ID NO: 10437 - DNA, 21 bp, Homo sapiens
cagaatgaaggaaatcctgaa

SEQ ID NO: 10438 - DNA, 21 bp, Homo sapiens
agggacgatatgaatatgaaa

SEQ ID NO: 10439 - DNA, 21 bp, Homo sapiens
gtcgaggatgtcggtgaatta

SEQ ID NO: 10440 - DNA, 21 bp, Homo sapiens
cacgggaacatgtttgtggaa

SEQ ID NO: 10441 - DNA, 21 bp, Homo sapiens
ccggctctgcaccgtggctaa

SEQ ID NO: 10442 - DNA, 21 bp, Homo sapiens
ctccctggtctccagcttaaa

SEQ ID NO: 10443 - DNA, 21 bp, Homo sapiens
acggatatctgtggaccttat

SEQ ID NO: 10444 - DNA, 21 bp, Homo sapiens
caagggaatttgtgaactaga

SEQ ID NO: 10445 - DNA, 21 bp, Homo sapiens
gcggctgattggcacaattta

SEQ ID NO: 10446 - DNA, 21 bp, Homo sapiens
cggctgattggcacaatttaa

SEQ ID NO: 10447 - DNA, 21 bp, Homo sapiens
aggaatcgaactaacaataca

SEQ ID NO: 10448 - DNA, 21 bp, Homo sapiens
aacggttcacgtctagccaaa

SEQ ID NO: 10449 - DNA, 21 bp, Homo sapiens
tccattgatcccgtatcttaa

SEQ ID NO: 10450 - DNA, 21 bp, Homo sapiens
cacgttaatagaggtagtaca

SEQ ID NO: 10451 - DNA, 21 bp, Homo sapiens
aacccactatgctataagtta

SEQ ID NO: 10452 - DNA, 21 bp, Homo sapiens
aagaacgatttccctgcataa

SEQ ID NO: 10453 - DNA, 21 bp, Homo sapiens
ttccatggtagtggcaattta

SEQ ID NO: 10454 - DNA, 21 bp, Homo sapiens
cgccgtggttgcaacttataa

SEQ ID NO: 10455 - DNA, 21 bp, Homo sapiens
atggccagagtgggtcgtcaa

SEQ ID NO: 10456 - DNA, 21 bp, Homo sapiens
atccatgttcttagagcctca

SEQ ID NO: 10457 - DNA, 21 bp, Homo sapiens
cggctgttacttaaacaacta

SEQ ID NO: 10458 - DNA, 21 bp, Homo sapiens
cagggatcacatcactcttaa

SEQ ID NO: 10459 - DNA, 21 bp, Homo sapiens
cgcgctgaacagagagaatca

SEQ ID NO: 10460 - DNA, 21 bp, Homo sapiens
aacagagagaatcaggctcaa

SEQ ID NO: 10461 - DNA, 21 bp, Homo sapiens
ccagatttgagaagaaggcaa

SEQ ID NO: 10462 - DNA, 21 bp, Homo sapiens
cagatttgagaagaaggcaaa

SEQ ID NO: 10463 - DNA, 21 bp, Homo sapiens
tcaggtgatttagtaaataaa

SEQ ID NO: 10464 - DNA, 21 bp, Homo sapiens
caggagaaagttaatgcaaca

SEQ ID NO: 10465 - DNA, 21 bp, Homo sapiens
ccggatttgcttgttccagta

SEQ ID NO: 10466 - DNA, 21 bp, Homo sapiens
cggatttgcttgttccagtaa

SEQ ID NO: 10467 - DNA, 21 bp, Homo sapiens
caggttaagcttgtctggtca

SEQ ID NO: 10468 - DNA, 21 bp, Homo sapiens
atcatagtatttgttgaccta

SEQ ID NO: 10469 - DNA, 21 bp, Homo sapiens
cgccaagaatgcagacagata

SEQ ID NO: 10470 - DNA, 21 bp, Homo sapiens
aagggtgcaattgagaatcta

SEQ ID NO: 10471 - DNA, 21 bp, Homo sapiens
ctgggcaaagaatgtagtcaa

SEQ ID NO: 10472 - DNA, 21 bp, Homo sapiens
tcccgtagtatcggtacacaa

SEQ ID NO: 10473 - DNA, 21 bp, Homo sapiens
tgaggtgctgatgatgattaa

SEQ ID NO: 10474 - DNA, 21 bp, Homo sapiens
acgtgtggcctttgagatcaa

SEQ ID NO: 10475 - DNA, 21 bp, Homo sapiens
cacgtcgtttacgctcattaa

SEQ ID NO: 10476 - DNA, 21 bp, Homo sapiens
acgtcgtttacgctcattaaa

SEQ ID NO: 10477 - DNA, 21 bp, Homo sapiens
gaggattaccatcaccggaaa

SEQ ID NO: 10478 - DNA, 21 bp, Homo sapiens
cgggacgacctctatgaccaa

SEQ ID NO: 10479 - DNA, 21 bp, Homo sapiens
caagagatgcttcaaactgaa

SEQ ID NO: 10480 - DNA, 21 bp, Homo sapiens
cagcagaagtacgatgatgaa

SEQ ID NO: 10481 - DNA, 21 bp, Homo sapiens
taggctgaagtccttaattaa

SEQ ID NO: 10482 - DNA, 21 bp, Homo sapiens
atcactgatagtagcatttaa

SEQ ID NO: 10483 - DNA, 21 bp, Homo sapiens
ctggcatgtttggaaatcaaa

SEQ ID NO: 10484 - DNA, 21 bp, Homo sapiens
aagattcaagatcgacaagaa

SEQ ID NO: 10485 - DNA, 21 bp, Homo sapiens
tcggatattgtatataagaaa

SEQ ID NO: 10486 - DNA, 21 bp, Homo sapiens
aacattcgacttccacctgaa

SEQ ID NO: 10487 - DNA, 21 bp, Homo sapiens
cagcttctagatgacatagaa

SEQ ID NO: 10488 - DNA, 21 bp, Homo sapiens
aaggaagttaatacctatgta

SEQ ID NO: 10489 - DNA, 21 bp, Homo sapiens
ctgggacattcttcaattcca

SEQ ID NO: 10490 - DNA, 21 bp, Homo sapiens
aagccttaggtaaataagtca

SEQ ID NO: 10491 - DNA, 21 bp, Homo sapiens
ctggcgattaacctgaaacaa

SEQ ID NO: 10492 - DNA, 21 bp, Homo sapiens
ctcctgttaaatcatgcttca

SEQ ID NO: 10493 - DNA, 21 bp, Homo sapiens
ctgtaacttaatggcaataaa

SEQ ID NO: 10494 - DNA, 21 bp, Homo sapiens
cagtaatatgtatatcatcta

SEQ ID NO: 10495 - DNA, 21 bp, Homo sapiens
ctggctaaagacggctcgaaa

SEQ ID NO: 10496 - DNA, 21 bp, Homo sapiens
acggagcattgagacatttaa

SEQ ID NO: 10497 - DNA, 21 bp, Homo sapiens
cggagcattgagacatttaaa

SEQ ID NO: 10498 - DNA, 21 bp, Homo sapiens
cacgatgaactatagcatatt

SEQ ID NO: 10499 - DNA, 21 bp, Homo sapiens
aagcagtactctgacagacta

SEQ ID NO: 10500 - DNA, 21 bp, Homo sapiens
accgtacttagacatagctaa

SEQ ID NO: 10501 - DNA, 21 bp, Homo sapiens
tagaggcttatgagtatctta

SEQ ID NO: 10502 - DNA, 21 bp, Homo sapiens
atcctcagatgtggtggttaa

SEQ ID NO: 10503 - DNA, 21 bp, Homo sapiens
ccgagagacaccgctctacaa

SEQ ID NO: 10504 - DNA, 21 bp, Homo sapiens
caagtacggtgctgacatcaa

SEQ ID NO: 10505 - DNA, 21 bp, Homo sapiens
cggcgcgaacatcgacgccta

SEQ ID NO: 10506 - DNA, 21 bp, Homo sapiens
cccaggcaggctgattagata

SEQ ID NO: 10507 - DNA, 21 bp, Homo sapiens
ttggttggtatactcaaagaa

SEQ ID NO: 10508 - DNA, 21 bp, Homo sapiens
acggattcagagagcatacaa

SEQ ID NO: 10509 - DNA, 21 bp, Homo sapiens
ctgatgattcagtaaggttaa

SEQ ID NO: 10510 - DNA, 21 bp, Homo sapiens
tggaaggtgtactaatatata

SEQ ID NO: 10511 - DNA, 21 bp, Homo sapiens
atggacggcactttacatata

SEQ ID NO: 10512 - DNA, 21 bp, Homo sapiens
tgggactgttacaatacttca

SEQ ID NO: 10513 - DNA, 21 bp, Homo sapiens
gagcgtacatctgaaattcaa

SEQ ID NO: 10514 - DNA, 21 bp, Homo sapiens
ccaggttaccgctatcgtcaa

SEQ ID NO: 10515 - DNA, 21 bp, Homo sapiens
cccttgattgagaaagagaaa

SEQ ID NO: 10516 - DNA, 21 bp, Homo sapiens
cagaggctttgtggacctaat

SEQ ID NO: 10517 - DNA, 21 bp, Homo sapiens
tcagtatttggagaacatgaa

SEQ ID NO: 10518 - DNA, 21 bp, Homo sapiens
ccagggaatcttggaatcaga

SEQ ID NO: 10519 - DNA, 21 bp, Homo sapiens
tcgctaataaatcaacagaaa

SEQ ID NO: 10520 - DNA, 21 bp, Homo sapiens
cacagaaatgtttgaggtcta

SEQ ID NO: 10521 - DNA, 21 bp, Homo sapiens
cgcaaactaaagcaaagctaa

SEQ ID NO: 10522 - DNA, 21 bp, Homo sapiens
ctgcagatactctaatcacta

SEQ ID NO: 10523 - DNA, 21 bp, Homo sapiens
tccgtttagaagcaacgtgta

SEQ ID NO: 10524 - DNA, 21 bp, Homo sapiens
ctcgccctgttcctacactta

SEQ ID NO: 10525 - DNA, 21 bp, Homo sapiens
cacgctgaatagaaactataa

SEQ ID NO: 10526 - DNA, 21 bp, Homo sapiens
cagggatagtctacaaatgta

SEQ ID NO: 10527 - DNA, 21 bp, Homo sapiens
atgataaactctagacatata

SEQ ID NO: 10528 - DNA, 21 bp, Homo sapiens
ttcattatttgtactaaacaa

SEQ ID NO: 10529 - DNA, 21 bp, Homo sapiens
cagaatttatattgtttatta

SEQ ID NO: 10530 - DNA, 21 bp, Homo sapiens
aaggttaaagttaagattcta

SEQ ID NO: 10531 - DNA, 21 bp, Homo sapiens
ccacagcagaatctaaagaaa

SEQ ID NO: 10532 - DNA, 21 bp, Homo sapiens
caagcttcttgctataatgta

SEQ ID NO: 10533 - DNA, 21 bp, Homo sapiens
atggaggatttcggtagattt

SEQ ID NO: 10534 - DNA, 21 bp, Homo sapiens
atcgataggaatccagaccta

SEQ ID NO: 10535 - DNA, 21 bp, Homo sapiens
cagattgcttagtggacttta

SEQ ID NO: 10536 - DNA, 21 bp, Homo sapiens
acgacatgccatgtactgcaa

SEQ ID NO: 10537 - DNA, 21 bp, Homo sapiens
cacgtcgtgacttaaatgaat

SEQ ID NO: 10538 - DNA, 21 bp, Homo sapiens
cagtattgactcggagacaaa

SEQ ID NO: 10539 - DNA, 21 bp, Homo sapiens
tccgaggttcttaatatgaga

SEQ ID NO: 10540 - DNA, 21 bp, Homo sapiens
tacagaggtggtttaatcaaa

SEQ ID NO: 10541 - DNA, 21 bp, Homo sapiens
cgcgtatatatccctctagta

SEQ ID NO: 10542 - DNA, 21 bp, Homo sapiens
aagtattgctaagtactataa

SEQ ID NO: 10543 - DNA, 21 bp, Homo sapiens
cacgactgttgtacaagctca

SEQ ID NO: 10544 - DNA, 21 bp, Homo sapiens
ccgacaagtgatcgcccacaa

SEQ ID NO: 10545 - DNA, 21 bp, Homo sapiens
caggaggcgaataaatgttca

SEQ ID NO: 10546 - DNA, 21 bp, Homo sapiens
cgcccggaagatggaggtcaa

SEQ ID NO: 10547 - DNA, 21 bp, Homo sapiens
ccgcttggtatcgaagcacaa

SEQ ID NO: 10548 - DNA, 21 bp, Homo sapiens
aacggcgacgtcagcgacaaa

SEQ ID NO: 10549 - DNA, 21 bp, Homo sapiens
atcgggatattaagtgttcta

SEQ ID NO: 10550 - DNA, 21 bp, Homo sapiens
accggatatcgggaagttcaa

SEQ ID NO: 10551 - DNA, 21 bp, Homo sapiens
acggtgtgataatactcttta

SEQ ID NO: 10552 - DNA, 21 bp, Homo sapiens
caggatgagatcagaaggata

SEQ ID NO: 10553 - DNA, 21 bp, Homo sapiens
cagctggtgcatggactcaaa

SEQ ID NO: 10554 - DNA, 21 bp, Homo sapiens
ccggaacgcagggaaaggcaa

SEQ ID NO: 10555 - DNA, 21 bp, Homo sapiens
caggaagaaataagacatgaa

SEQ ID NO: 10556 - DNA, 21 bp, Homo sapiens
atgcaatatcatgaactttaa

SEQ ID NO: 10557 - DNA, 21 bp, Homo sapiens
acggtcggagtccggaagaaa

SEQ ID NO: 10558 - DNA, 21 bp, Homo sapiens
cacgttcgacttggagctgaa

SEQ ID NO: 10559 - DNA, 21 bp, Homo sapiens
ctggaattagccgcttaaata

SEQ ID NO: 10560 - DNA, 21 bp, Homo sapiens
cagccaagtgtcgtccacata

SEQ ID NO: 10561 - DNA, 21 bp, Homo sapiens
ccggacgtcggcaacggagaa

SEQ ID NO: 10562 - DNA, 21 bp, Homo sapiens
cagccaattggtcgagacaaa

SEQ ID NO: 10563 - DNA, 21 bp, Homo sapiens
caccgagtcgtgtaccatgaa

SEQ ID NO: 10564 - DNA, 21 bp, Homo sapiens
acgcacaaagattgagtccaa

SEQ ID NO: 10565 - DNA, 21 bp, Homo sapiens
aaggaactttgtcacatctaa

SEQ ID NO: 10566 - DNA, 21 bp, Homo sapiens
accctgcatcaaagaaattaa

SEQ ID NO: 10567 - DNA, 21 bp, Homo sapiens
cagtctgatcacgatcataga

SEQ ID NO: 10568 - DNA, 21 bp, Homo sapiens
cacgatcatagaaattattga

SEQ ID NO: 10569 - DNA, 21 bp, Homo sapiens
atcatagaaattattgaatat

SEQ ID NO: 10570 - DNA, 21 bp, Homo sapiens
aggagtgttaatggtcactta

SEQ ID NO: 10571 - DNA, 21 bp, Homo sapiens
ctcggcggtttatgtgaagaa

SEQ ID NO: 10572 - DNA, 21 bp, Homo sapiens
tcagtgggactctacagataa

SEQ ID NO: 10573 - DNA, 21 bp, Homo sapiens
aaccatatggttcaaatccta

SEQ ID NO: 10574 - DNA, 21 bp, Homo sapiens
ctggaatcaaatggtctgtca

SEQ ID NO: 10575 - DNA, 21 bp, Homo sapiens
acccttggatttagaattata

SEQ ID NO: 10576 - DNA, 21 bp, Homo sapiens
atccatcaaccttcttattaa

SEQ ID NO: 10577 - DNA, 21 bp, Homo sapiens
ctgggcctacagaatctccta

SEQ ID NO: 10578 - DNA, 21 bp, Homo sapiens
cagcatcaactccagcatcga

SEQ ID NO: 10579 - DNA, 21 bp, Homo sapiens
tggctggaagctgatgggaaa

SEQ ID NO: 10580 - DNA, 21 bp, Homo sapiens
tgggtgcttgccaaagagata

SEQ ID NO: 10581 - DNA, 21 bp, Homo sapiens
ttcgatttaagcatggcttaa

SEQ ID NO: 10582 - DNA, 21 bp, Homo sapiens
aagattagtgccacactgaaa

SEQ ID NO: 10583 - DNA, 21 bp, Homo sapiens
atggataatcttatgctagaa

SEQ ID NO: 10584 - DNA, 21 bp, Homo sapiens
cacgctgcagatcccattata

SEQ ID NO: 10585 - DNA, 21 bp, Homo sapiens
cccgcagacgtcatccgggaa

SEQ ID NO: 10586 - DNA, 21 bp, Homo sapiens
ctgggtgattgggatctcaca

SEQ ID NO: 10587 - DNA, 21 bp, Homo sapiens
acggccaaactcatcctggaa

SEQ ID NO: 10588 - DNA, 21 bp, Homo sapiens
aacaggtgtaatagtcaataa

SEQ ID NO: 10589 - DNA, 21 bp, Homo sapiens
aacgtttatactggacagata

SEQ ID NO: 10590 - DNA, 21 bp, Homo sapiens
ctggatggtggtaatttagaa

SEQ ID NO: 10591 - DNA, 21 bp, Homo sapiens
ccctactatactcgttagcaa

SEQ ID NO: 10592 - DNA, 21 bp, Homo sapiens
tagatgattcatgtaagttaa

SEQ ID NO: 10593 - DNA, 21 bp, Homo sapiens
cgcacacaactgggagatgaa

SEQ ID NO: 10594 - DNA, 21 bp, Homo sapiens
ccgaatgaactacagccgcaa

SEQ ID NO: 10595 - DNA, 21 bp, Homo sapiens
taacacaatagtattactcta

SEQ ID NO: 10596 - DNA, 21 bp, Homo sapiens
cgagctgtatttcatcatgaa

SEQ ID NO: 10597 - DNA, 21 bp, Homo sapiens
cccagtccagatcgtcaacaa

SEQ ID NO: 10598 - DNA, 21 bp, Homo sapiens
cagatcgtcaacaacaagttt

SEQ ID NO: 10599 - DNA, 21 bp, Homo sapiens
ccggcgtgtcattgccaacca

SEQ ID NO: 10600 - DNA, 21 bp, Homo sapiens
ctggagcaggagcaacagcaa

SEQ ID NO: 10601 - DNA, 21 bp, Homo sapiens
cccagaaagcagagaactgaa

SEQ ID NO: 10602 - DNA, 21 bp, Homo sapiens
caggtgcaagtgcagtttcaa

SEQ ID NO: 10603 - DNA, 21 bp, Homo sapiens
caccagaggacagacgttgaa

SEQ ID NO: 10604 - DNA, 21 bp, Homo sapiens
cccggttatgccggaatcgtt

SEQ ID NO: 10605 - DNA, 21 bp, Homo sapiens
gaggacagacgttgaaagata

SEQ ID NO: 10606 - DNA, 21 bp, Homo sapiens
ctcaactatcatggacattca

SEQ ID NO: 10607 - DNA, 21 bp, Homo sapiens
caggatgttaatatgctataa

SEQ ID NO: 10608 - DNA, 21 bp, Homo sapiens
aaggagtagttaagctctgta

SEQ ID NO: 10609 - DNA, 21 bp, Homo sapiens
caactgtttattgctaaagaa

SEQ ID NO: 10610 - DNA, 21 bp, Homo sapiens
aagactgactgtagactgcaa

SEQ ID NO: 10611 - DNA, 21 bp, Homo sapiens
ccaactaatcttagaaggtaa

SEQ ID NO: 10612 - DNA, 21 bp, Homo sapiens
cccgggcagatccgtgtggta

SEQ ID NO: 10613 - DNA, 21 bp, Homo sapiens
tcggcggaggtttggcaagaa

SEQ ID NO: 10614 - DNA, 21 bp, Homo sapiens
ccagtctaacaccacaactaa

SEQ ID NO: 10615 - DNA, 21 bp, Homo sapiens
ctacataagagttatctgtta

SEQ ID NO: 10616 - DNA, 21 bp, Homo sapiens
aagagttatctgttactgtta

SEQ ID NO: 10617 - DNA, 21 bp, Homo sapiens
ccgcactatcctcaacaagat

SEQ ID NO: 10618 - DNA, 21 bp, Homo sapiens
caggagctatagtggagtgaa

SEQ ID NO: 10619 - DNA, 21 bp, Homo sapiens
catatttgatttagagggtaa

SEQ ID NO: 10620 - DNA, 21 bp, Homo sapiens
aagcagtgggatagtgtggta

SEQ ID NO: 10621 - DNA, 21 bp, Homo sapiens
ctgaagaggattaatgattga

SEQ ID NO: 10622 - DNA, 21 bp, Homo sapiens
acgtactaccatcttgattaa

SEQ ID NO: 10623 - DNA, 21 bp, Homo sapiens
caggatcgcactcatgtggaa

SEQ ID NO: 10624 - DNA, 21 bp, Homo sapiens
cacggacttcattgttctcaa

SEQ ID NO: 10625 - DNA, 21 bp, Homo sapiens
cacgtgctggtcctgatgaaa

SEQ ID NO: 10626 - DNA, 21 bp, Homo sapiens
aggagaataatcaatagaata

SEQ ID NO: 10627 - DNA, 21 bp, Homo sapiens
cacatttggttcagaaattaa

SEQ ID NO: 10628 - DNA, 21 bp, Homo sapiens
ctgcttgacctttctaagaaa

SEQ ID NO: 10629 - DNA, 21 bp, Homo sapiens
ccggcatgcagtggtaattat

SEQ ID NO: 10630 - DNA, 21 bp, Homo sapiens
atggatctgctctaaacctta

SEQ ID NO: 10631 - DNA, 21 bp, Homo sapiens
caaagtctaatttaataacta

SEQ ID NO: 10632 - DNA, 21 bp, Homo sapiens
taggtggaacttgggaaacta

SEQ ID NO: 10633 - DNA, 21 bp, Homo sapiens
taggtaatgtgtagttctcaa

SEQ ID NO: 10634 - DNA, 21 bp, Homo sapiens
cacagaaatgctagttggaaa

SEQ ID NO: 10635 - DNA, 21 bp, Homo sapiens
ccgaatctaattccgcaggaa

SEQ ID NO: 10636 - DNA, 21 bp, Homo sapiens
cacgcatattcagatgttgca

SEQ ID NO: 10637 - DNA, 21 bp, Homo sapiens
acacacaatttcattcatata

SEQ ID NO: 10638 - DNA, 21 bp, Homo sapiens
tggtatgtgtttgatgctata

SEQ ID NO: 10639 - DNA, 21 bp, Homo sapiens
aagctttaggaaactactaaa

SEQ ID NO: 10640 - DNA, 21 bp, Homo sapiens
agggatgaggacaatgatgaa

SEQ ID NO: 10641 - DNA, 21 bp, Homo sapiens
ggcgttgagtgttatagtgaa

SEQ ID NO: 10642 - DNA, 21 bp, Homo sapiens
ctcctagatgctagaacttat

SEQ ID NO: 10643 - DNA, 21 bp, Homo sapiens
taccacgacatttaacatcaa

SEQ ID NO: 10644 - DNA, 21 bp, Homo sapiens
accagtatgagttgccattaa

SEQ ID NO: 10645 - DNA, 21 bp, Homo sapiens
cgggagtcagtccaataggaa

SEQ ID NO: 10646 - DNA, 21 bp, Homo sapiens
ttggctggaattggagaccaa

SEQ ID NO: 10647 - DNA, 21 bp, Homo sapiens
cagcgtggagatccacgataa

SEQ ID NO: 10648 - DNA, 21 bp, Homo sapiens
ctggaatttgttggaagcaga

SEQ ID NO: 10649 - DNA, 21 bp, Homo sapiens
cagggctgagagacacgtgaa

SEQ ID NO: 10650 - DNA, 21 bp, Homo sapiens
aacacttacaaataaatccaa

SEQ ID NO: 10651 - DNA, 21 bp, Homo sapiens
aaggaagatgatgggaggaaa

SEQ ID NO: 10652 - DNA, 21 bp, Homo sapiens
atccaagactgtcatatttaa

SEQ ID NO: 10653 - DNA, 21 bp, Homo sapiens
ctcacaaagcacaatattaaa

SEQ ID NO: 10654 - DNA, 21 bp, Homo sapiens
gaggatttggattaagcataa

SEQ ID NO: 10655 - DNA, 21 bp, Homo sapiens
ctgtatgtcactacatatgaa

SEQ ID NO: 10656 - DNA, 21 bp, Homo sapiens
ttggagcatagtaccatagaa

SEQ ID NO: 10657 - DNA, 21 bp, Homo sapiens
caagggaaccttactgtgtta

SEQ ID NO: 10658 - DNA, 21 bp, Homo sapiens
aagcacaaactaggaagacta

SEQ ID NO: 10659 - DNA, 21 bp, Homo sapiens
acgcattccttcagctctcaa

SEQ ID NO: 10660 - DNA, 21 bp, Homo sapiens
acccaggttaatgcctgataa

SEQ ID NO: 10661 - DNA, 21 bp, Homo sapiens
tcccggcttatgcaactacaa

SEQ ID NO: 10662 - DNA, 21 bp, Homo sapiens
cgagcgtgtcttgaagagaaa

SEQ ID NO: 10663 - DNA, 21 bp, Homo sapiens
cccattaaagagccagtttat

SEQ ID NO: 10664 - DNA, 21 bp, Homo sapiens
tcccattaaagagccagttta

SEQ ID NO: 10665 - DNA, 21 bp, Homo sapiens
cagggaaggccgataatttaa

SEQ ID NO: 10666 - DNA, 21 bp, Homo sapiens
ttgggtcctcatgttatttat

SEQ ID NO: 10667 - DNA, 21 bp, Homo sapiens
ctcatgttatttattgccgaa

SEQ ID NO: 10668 - DNA, 21 bp, Homo sapiens
cagacctaaggtggagtaaca

SEQ ID NO: 10669 - DNA, 21 bp, Homo sapiens
tcagctcaattcaggaagtta

SEQ ID NO: 10670 - DNA, 21 bp, Homo sapiens
ccaaattggcttaacattcta

SEQ ID NO: 10671 - DNA, 21 bp, Homo sapiens
tcggtttaattggaaatggaa

SEQ ID NO: 10672 - DNA, 21 bp, Homo sapiens
gccgttggcttcgctatctta

SEQ ID NO: 10673 - DNA, 21 bp, Homo sapiens
ctggagaactgtggtttgtaa

SEQ ID NO: 10674 - DNA, 21 bp, Homo sapiens
cagggcctatccaactgttaa

SEQ ID NO: 10675 - DNA, 21 bp, Homo sapiens
cagcttaagtttggtacacta

SEQ ID NO: 10676 - DNA, 21 bp, Homo sapiens
ctcgacggacttataatgttt

SEQ ID NO: 10677 - DNA, 21 bp, Homo sapiens
ctgcatgatctgtttctacta

SEQ ID NO: 10678 - DNA, 21 bp, Homo sapiens
accagttgacttctgcattaa

SEQ ID NO: 10679 - DNA, 21 bp, Homo sapiens
cagggaaagatcgaagtttaa

SEQ ID NO: 10680 - DNA, 21 bp, Homo sapiens
aagcaaggaaataacaatcaa

SEQ ID NO: 10681 - DNA, 21 bp, Homo sapiens
ctcaatctaaagacaaatcta

SEQ ID NO: 10682 - DNA, 21 bp, Homo sapiens
aaggtttcactgaatgcgaaa

SEQ ID NO: 10683 - DNA, 21 bp, Homo sapiens
ctgatgcttgctacaaaccta

SEQ ID NO: 10684 - DNA, 21 bp, Homo sapiens
caccgtttccatcgtctcgta

SEQ ID NO: 10685 - DNA, 21 bp, Homo sapiens
ctccataagattcagaataaa

SEQ ID NO: 10686 - DNA, 21 bp, Homo sapiens
ctggttgttattcaccaacta

SEQ ID NO: 10687 - DNA, 21 bp, Homo sapiens
gagcggccacataattaccaa

SEQ ID NO: 10688 - DNA, 21 bp, Homo sapiens
cggccacataattaccaatta

SEQ ID NO: 10689 - DNA, 21 bp, Homo sapiens
cacccagttctcccagttcaa

SEQ ID NO: 10690 - DNA, 21 bp, Homo sapiens
ctggaccacgtcatagacata

SEQ ID NO: 10691 - DNA, 21 bp, Homo sapiens
cacgaggatgtggtcaactca

SEQ ID NO: 10692 - DNA, 21 bp, Homo sapiens
cccgttcagggccctgaataa

SEQ ID NO: 10693 - DNA, 21 bp, Homo sapiens
gagcataattatctcaggtaa

SEQ ID NO: 10694 - DNA, 21 bp, Homo sapiens
acgagttggccttatccttaa

SEQ ID NO: 10695 - DNA, 21 bp, Homo sapiens
accgtatatttatgaagcata

SEQ ID NO: 10696 - DNA, 21 bp, Homo sapiens
ccgtatatttatgaagcataa

SEQ ID NO: 10697 - DNA, 21 bp, Homo sapiens
atgaccaaataagtaacttaa

SEQ ID NO: 10698 - DNA, 21 bp, Homo sapiens
cagcagtgacagcacactgaa

SEQ ID NO: 10699 - DNA, 21 bp, Homo sapiens
aaggacaaatgcctccggata

SEQ ID NO: 10700 - DNA, 21 bp, Homo sapiens
cccaggttctatgaccaaata

SEQ ID NO: 10701 - DNA, 21 bp, Homo sapiens
ttcgaggttatccaacaatta

SEQ ID NO: 10702 - DNA, 21 bp, Homo sapiens
cagattgaagtcaattattca

SEQ ID NO: 10703 - DNA, 21 bp, Homo sapiens
atgctgttaatttaacaagta

SEQ ID NO: 10704 - DNA, 21 bp, Homo sapiens
taggatattaagactatcaat

SEQ ID NO: 10705 - DNA, 21 bp, Homo sapiens
ccagtcaatgctgaaagtcaa

SEQ ID NO: 10706 - DNA, 21 bp, Homo sapiens
cacgtcatccagctagggaaa

SEQ ID NO: 10707 - DNA, 21 bp, Homo sapiens
accgacaagatctttctggaa

SEQ ID NO: 10708 - DNA, 21 bp, Homo sapiens
ccggcacgataaaccagtcaa

SEQ ID NO: 10709 - DNA, 21 bp, Homo sapiens
ttgggtatgattagagtgaaa

SEQ ID NO: 10710 - DNA, 21 bp, Homo sapiens
aagaataacaacagagatcta

SEQ ID NO: 10711 - DNA, 21 bp, Homo sapiens
tggatacatattggacttcaa

SEQ ID NO: 10712 - DNA, 21 bp, Homo sapiens
cagctcattattcatatgcta

SEQ ID NO: 10713 - DNA, 21 bp, Homo sapiens
ccgtagcacagtagaaatgaa

SEQ ID NO: 10714 - DNA, 21 bp, Homo sapiens
caggatcagcataaccgccaa

SEQ ID NO: 10715 - DNA, 21 bp, Homo sapiens
ctgagtatagtttgactgtaa

SEQ ID NO: 10716 - DNA, 21 bp, Homo sapiens
cccgaagcaactggtaagcaa

SEQ ID NO: 10717 - DNA, 21 bp, Homo sapiens
ctgcgccatagtagcaggtaa

SEQ ID NO: 10718 - DNA, 21 bp, Homo sapiens
ccggagaatatttctctcaca

SEQ ID NO: 10719 - DNA, 21 bp, Homo sapiens
ccctagtgaactgtcaatata

SEQ ID NO: 10720 - DNA, 21 bp, Homo sapiens
caggcagatggtgggacctat

SEQ ID NO: 10721 - DNA, 21 bp, Homo sapiens
ctgaataacaacattgctaaa

SEQ ID NO: 10722 - DNA, 21 bp, Homo sapiens
aaggtttaaatgaagaagtaa

SEQ ID NO: 10723 - DNA, 21 bp, Homo sapiens
aagatttaaatgagtccttaa

SEQ ID NO: 10724 - DNA, 21 bp, Homo sapiens
cagcatctctacaagcatcaa

SEQ ID NO: 10725 - DNA, 21 bp, Homo sapiens
ccgggcctgtgagttaggaaa

SEQ ID NO: 10726 - DNA, 21 bp, Homo sapiens
ccgggaggatttccagatcca

SEQ ID NO: 10727 - DNA, 21 bp, Homo sapiens
cacctcaggaagtgactctaa

SEQ ID NO: 10728 - DNA, 21 bp, Homo sapiens
ctcctgtagattactcctgaa

SEQ ID NO: 10729 - DNA, 21 bp, Homo sapiens
ccgagaggtggagtactttaa

SEQ ID NO: 10730 - DNA, 21 bp, Homo sapiens
cagaaactcagagcaactaaa

SEQ ID NO: 10731 - DNA, 21 bp, Homo sapiens
aagactgtccagaaactttaa

SEQ ID NO: 10732 - DNA, 21 bp, Homo sapiens
aaccgtaacctcacacattaa

SEQ ID NO: 10733 - DNA, 21 bp, Homo sapiens
tagcacaataatttaactgaa

SEQ ID NO: 10734 - DNA, 21 bp, Homo sapiens
atcagagttactagtagggta

SEQ ID NO: 10735 - DNA, 21 bp, Homo sapiens
gaggcgatctttggaattaga

SEQ ID NO: 10736 - DNA, 21 bp, Homo sapiens
cggcacttatgacaacattaa

SEQ ID NO: 10737 - DNA, 21 bp, Homo sapiens
aaccaagattgccctatagaa

SEQ ID NO: 10738 - DNA, 21 bp, Homo sapiens
ctagagtacctgggtacataa

SEQ ID NO: 10739 - DNA, 21 bp, Homo sapiens
caggctcatcaaagacattta

SEQ ID NO: 10740 - DNA, 21 bp, Homo sapiens
caggataaatttatttaccat

SEQ ID NO: 10741 - DNA, 21 bp, Homo sapiens
aagcacaggcacaaagtatat

SEQ ID NO: 10742 - DNA, 21 bp, Homo sapiens
ctggaagatcagaaccgggaa

SEQ ID NO: 10743 - DNA, 21 bp, Homo sapiens
cacactcaatcgttctttgaa

SEQ ID NO: 10744 - DNA, 21 bp, Homo sapiens
caccctggaggtgaatatgta

SEQ ID NO: 10745 - DNA, 21 bp, Homo sapiens
ctccaaatagttaaactggaa

SEQ ID NO: 10746 - DNA, 21 bp, Homo sapiens
tagagttaactttgtaatgta

SEQ ID NO: 10747 - DNA, 21 bp, Homo sapiens
cccgtcatggaccttgacttt

SEQ ID NO: 10748 - DNA, 21 bp, Homo sapiens
cacgatccggccagatcgcaa

SEQ ID NO: 10749 - DNA, 21 bp, Homo sapiens
cagccttggcctgaaacctca

SEQ ID NO: 10750 - DNA, 21 bp, Homo sapiens
caggtgcgtgggactcatgaa

SEQ ID NO: 10751 - DNA, 21 bp, Homo sapiens
aagacgtatattcaacataaa

SEQ ID NO: 10752 - DNA, 21 bp, Homo sapiens
aagcattaagataaacaaata

SEQ ID NO: 10753 - DNA, 21 bp, Homo sapiens
ccgctggatcgaggatgttaa

SEQ ID NO: 10754 - DNA, 21 bp, Homo sapiens
cactctttcatcgtcatggaa

SEQ ID NO: 10755 - DNA, 21 bp, Homo sapiens
ccgggtctgtacaatacggtt

SEQ ID NO: 10756 - DNA, 21 bp, Homo sapiens
tacaatacggtttgctataaa

SEQ ID NO: 10757 - DNA, 21 bp, Homo sapiens
aagggaagctttgtaccttta

SEQ ID NO: 10758 - DNA, 21 bp, Homo sapiens
ctgatgtttcctacaactaaa

SEQ ID NO: 10759 - DNA, 21 bp, Homo sapiens
atggttgcaattgatccttaa

SEQ ID NO: 10760 - DNA, 21 bp, Homo sapiens
ttcccacttactgcacaacaa

SEQ ID NO: 10761 - DNA, 21 bp, Homo sapiens
ccggtggaacacgtacttcaa

SEQ ID NO: 10762 - DNA, 21 bp, Homo sapiens
cacagaaatcttggaaaccaa

SEQ ID NO: 10763 - DNA, 21 bp, Homo sapiens
aaggtttatctcaagtctcaa

SEQ ID NO: 10764 - DNA, 21 bp, Homo sapiens
caccgagactgggatcttgaa

SEQ ID NO: 10765 - DNA, 21 bp, Homo sapiens
cgagatgttcccgcaaatcaa

SEQ ID NO: 10766 - DNA, 21 bp, Homo sapiens
tgagatgttgttagcctataa

SEQ ID NO: 10767 - DNA, 21 bp, Homo sapiens
cccgtggattcaatcttctta

SEQ ID NO: 10768 - DNA, 21 bp, Homo sapiens
tccaattatatggaagagtta

SEQ ID NO: 10769 - DNA, 21 bp, Homo sapiens
tcagttcaggataaataccaa

SEQ ID NO: 10770 - DNA, 21 bp, Homo sapiens
aaggttacaaacccacaccaa

SEQ ID NO: 10771 - DNA, 21 bp, Homo sapiens
tagcttcacaacgtcaagtta

SEQ ID NO: 10772 - DNA, 21 bp, Homo sapiens
caggagcggttcagatcaata

SEQ ID NO: 10773 - DNA, 21 bp, Homo sapiens
aagggtgaaataagagattta

SEQ ID NO: 10774 - DNA, 21 bp, Homo sapiens
ctggtgaacttctgtgcttaa

SEQ ID NO: 10775 - DNA, 21 bp, Homo sapiens
atggcgtttactggcccttat

SEQ ID NO: 10776 - DNA, 21 bp, Homo sapiens
ctggcccttattcgtcctgat

SEQ ID NO: 10777 - DNA, 21 bp, Homo sapiens
cggccttgtgttggcaggcaa

SEQ ID NO: 10778 - DNA, 21 bp, Homo sapiens
aagcatcatcatagagaagta

SEQ ID NO: 10779 - DNA, 21 bp, Homo sapiens
acgggtgtcatcccgaacaaa

SEQ ID NO: 10780 - DNA, 21 bp, Homo sapiens
gaggatgataccatcaaccta

SEQ ID NO: 10781 - DNA, 21 bp, Homo sapiens
ccggccggacgactcctgtaa

SEQ ID NO: 10782 - DNA, 21 bp, Homo sapiens
ccgcaggaagaggacgggata

SEQ ID NO: 10783 - DNA, 21 bp, Homo sapiens
ctgggatggtgtggtgagcaa

SEQ ID NO: 10784 - DNA, 21 bp, Homo sapiens
cacactaaggatagcaattta

SEQ ID NO: 10785 - DNA, 21 bp, Homo sapiens
aggatagcaatttatctcaaa

SEQ ID NO: 10786 - DNA, 21 bp, Homo sapiens
tacacactaataaacaattaa

SEQ ID NO: 10787 - DNA, 21 bp, Homo sapiens
aaggcctttcatataaattta

SEQ ID NO: 10788 - DNA, 21 bp, Homo sapiens
cagctgtagactaacaatata

SEQ ID NO: 10789 - DNA, 21 bp, Homo sapiens
ctgcacgacgttcatagttga

SEQ ID NO: 10790 - DNA, 21 bp, Homo sapiens
caagatcgtcatcgtgagcaa

SEQ ID NO: 10791 - DNA, 21 bp, Homo sapiens
cgggtttacctttctaaggaa

SEQ ID NO: 10792 - DNA, 21 bp, Homo sapiens
aacgtgggaatcggtgcataa

SEQ ID NO: 10793 - DNA, 21 bp, Homo sapiens
ccggaagaagttggtcatcta

SEQ ID NO: 10794 - DNA, 21 bp, Homo sapiens
aaggaacactgtcaaactata

SEQ ID NO: 10795 - DNA, 21 bp, Homo sapiens
acgcagctgcaacaaattgaa

SEQ ID NO: 10796 - DNA, 21 bp, Homo sapiens
cgcgcagaccaaagccattaa

SEQ ID NO: 10797 - DNA, 21 bp, Homo sapiens
cagatttaaatgatacatcaa

SEQ ID NO: 10798 - DNA, 21 bp, Homo sapiens
ctggaagagattgaacaagaa

SEQ ID NO: 10799 - DNA, 21 bp, Homo sapiens
ccgcgacaacagcgcccttaa

SEQ ID NO: 10800 - DNA, 21 bp, Homo sapiens
tcgagttgtcatgaggatgaa

SEQ ID NO: 10801 - DNA, 21 bp, Homo sapiens
cagctgattcagaaggagcaa

SEQ ID NO: 10802 - DNA, 21 bp, Homo sapiens
gtcggaaatgttaaactttaa

SEQ ID NO: 10803 - DNA, 21 bp, Homo sapiens
ctggatggtgaatgtccagaa

SEQ ID NO: 10804 - DNA, 21 bp, Homo sapiens
ccagaacagttgtgcctataa

SEQ ID NO: 10805 - DNA, 21 bp, Homo sapiens
ctgctggaaataattcatcaa

SEQ ID NO: 10806 - DNA, 21 bp, Homo sapiens
gaggtggtttagacaaattaa

SEQ ID NO: 10807 - DNA, 21 bp, Homo sapiens
aagggatttaaatataacaaa

SEQ ID NO: 10808 - DNA, 21 bp, Homo sapiens
ccggtggaatctgatcttgaa

SEQ ID NO: 10809 - DNA, 21 bp, Homo sapiens
ccggaccaagatgttccttta

SEQ ID NO: 10810 - DNA, 21 bp, Homo sapiens
cacattcctcttaacaagtaa

SEQ ID NO: 10811 - DNA, 21 bp, Homo sapiens
ctggtggatgtaactactcca

SEQ ID NO: 10812 - DNA, 21 bp, Homo sapiens
caccttgaagagggcagataa

SEQ ID NO: 10813 - DNA, 21 bp, Homo sapiens
tcgcgattcaatgatcgatat

SEQ ID NO: 10814 - DNA, 21 bp, Homo sapiens
aatgatcgatatgctcataaa

SEQ ID NO: 10815 - DNA, 21 bp, Homo sapiens
ttggaacatattccaattcaa

SEQ ID NO: 10816 - DNA, 21 bp, Homo sapiens
ctggtcattcatgaccttaaa

SEQ ID NO: 10817 - DNA, 21 bp, Homo sapiens
gagcctgagattgacctggaa

SEQ ID NO: 10818 - DNA, 21 bp, Homo sapiens
caggcctgccctgaaactcca

SEQ ID NO: 10819 - DNA, 21 bp, Homo sapiens
ccgcctgacagtgaagtatga

SEQ ID NO: 10820 - DNA, 21 bp, Homo sapiens
caggagctcttccaggatcaa

SEQ ID NO: 10821 - DNA, 21 bp, Homo sapiens
ctgggtattggtgtaaatgaa

SEQ ID NO: 10822 - DNA, 21 bp, Homo sapiens
taggttaaggaaggagataaa

SEQ ID NO: 10823 - DNA, 21 bp, Homo sapiens
tagcacatccttcaaattaaa

SEQ ID NO: 10824 - DNA, 21 bp, Homo sapiens
cagcgtactcatggaaatgaa

SEQ ID NO: 10825 - DNA, 21 bp, Homo sapiens
tggagtcttgtttccaataaa

SEQ ID NO: 10826 - DNA, 21 bp, Homo sapiens
gacaggtagcatggaccttaa

SEQ ID NO: 10827 - DNA, 21 bp, Homo sapiens
aagaattataagagaaatgaa

SEQ ID NO: 10828 - DNA, 21 bp, Homo sapiens
atgggaatttaacatatttaa

SEQ ID NO: 10829 - DNA, 21 bp, Homo sapiens
ctgcagctgatttgaaattaa

SEQ ID NO: 10830 - DNA, 21 bp, Homo sapiens
gccaaagtgattagaaagaaa

SEQ ID NO: 10831 - DNA, 21 bp, Homo sapiens
caggagatgccattgctgaaa

SEQ ID NO: 10832 - DNA, 21 bp, Homo sapiens
ttggctgaagacactgaagta

SEQ ID NO: 10833 - DNA, 21 bp, Homo sapiens
gaagtggactaaagtattaaa

SEQ ID NO: 10834 - DNA, 21 bp, Homo sapiens
cagttctaccagcgaacgaaa

SEQ ID NO: 10835 - DNA, 21 bp, Homo sapiens
cagaaactatttgcaaacata

SEQ ID NO: 10836 - DNA, 21 bp, Homo sapiens
ctgaattgttcttatatgtaa

SEQ ID NO: 10837 - DNA, 21 bp, Homo sapiens
cacctggaaattggcgagaaa

SEQ ID NO: 10838 - DNA, 21 bp, Homo sapiens
ctggatatgcccacccaagaa

SEQ ID NO: 10839 - DNA, 21 bp, Homo sapiens
accctggatgttacatataaa

SEQ ID NO: 10840 - DNA, 21 bp, Homo sapiens
aaggaacctatcgaagaataa

SEQ ID NO: 10841 - DNA, 21 bp, Homo sapiens
cagaagtacatagataagtat

SEQ ID NO: 10842 - DNA, 21 bp, Homo sapiens
ctggatcattgtattactcat

SEQ ID NO: 10843 - DNA, 21 bp, Homo sapiens
ctcggtttgcaaattagataa

SEQ ID NO: 10844 - DNA, 21 bp, Homo sapiens
atggttaggcacgataactaa

SEQ ID NO: 10845 - DNA, 21 bp, Homo sapiens
acccatcgtgaagatcctgaa

SEQ ID NO: 10846 - DNA, 21 bp, Homo sapiens
aaacctctatttagatttcaa

SEQ ID NO: 10847 - DNA, 21 bp, Homo sapiens
caggatattgagagacattat

SEQ ID NO: 10848 - DNA, 21 bp, Homo sapiens
ccagataactattattaataa

SEQ ID NO: 10849 - DNA, 21 bp, Homo sapiens
aaggaagtagaccaggcgata

SEQ ID NO: 10850 - DNA, 21 bp, Homo sapiens
ccaccactctattcaggtaaa

SEQ ID NO: 10851 - DNA, 21 bp, Homo sapiens
ctcgtggtggttattgaaaca

SEQ ID NO: 10852 - DNA, 21 bp, Homo sapiens
tcgatatgctaagaagaacaa

SEQ ID NO: 10853 - DNA, 21 bp, Homo sapiens
atgggtcgggaagcagcatat

SEQ ID NO: 10854 - DNA, 21 bp, Homo sapiens
cccgaggactgggacattaaa

SEQ ID NO: 10855 - DNA, 21 bp, Homo sapiens
atgctattgccaatactttaa

SEQ ID NO: 10856 - DNA, 21 bp, Homo sapiens
caacagcaacttgatgctaca

SEQ ID NO: 10857 - DNA, 21 bp, Homo sapiens
ctgagttaagtagaagcctaa

SEQ ID NO: 10858 - DNA, 21 bp, Homo sapiens
aagcttggcgttactatgtat

SEQ ID NO: 10859 - DNA, 21 bp, Homo sapiens
ccgcaagatcgccgtagacaa

SEQ ID NO: 10860 - DNA, 21 bp, Homo sapiens
gaggaacatgtttgagttcaa

SEQ ID NO: 10861 - DNA, 21 bp, Homo sapiens
taagatgatcacacagcatta

SEQ ID NO: 10862 - DNA, 21 bp, Homo sapiens
aagaatatcattggccctgat

SEQ ID NO: 10863 - DNA, 21 bp, Homo sapiens
caggtaataatgttaactata

SEQ ID NO: 10864 - DNA, 21 bp, Homo sapiens
caggagaatcacatgctttaa

SEQ ID NO: 10865 - DNA, 21 bp, Homo sapiens
aagcagatcaagttcgagaaa

SEQ ID NO: 10866 - DNA, 21 bp, Homo sapiens
ctcagaggactcagcctttaa

SEQ ID NO: 10867 - DNA, 21 bp, Homo sapiens
ctgctgtgatccgtagtaata

SEQ ID NO: 10868 - DNA, 21 bp, Homo sapiens
atccgtagtaataaattctca

SEQ ID NO: 10869 - DNA, 21 bp, Homo sapiens
cacgtgcagatcaccacttta

SEQ ID NO: 10870 - DNA, 21 bp, Homo sapiens
cgggctcttcatggccgtcat

SEQ ID NO: 10871 - DNA, 21 bp, Homo sapiens
gaggagcagccagtacatcaa

SEQ ID NO: 10872 - DNA, 21 bp, Homo sapiens
tagtcaaatatttgttattaa

SEQ ID NO: 10873 - DNA, 21 bp, Homo sapiens
cggcgccttcgcgaaacacta

SEQ ID NO: 10874 - DNA, 21 bp, Homo sapiens
ctggctaagaagaattacaaa

SEQ ID NO: 10875 - DNA, 21 bp, Homo sapiens
ggcgtgattcatggaaattaa

SEQ ID NO: 10876 - DNA, 21 bp, Homo sapiens
caggagcaaccgaagacataa

SEQ ID NO: 10877 - DNA, 21 bp, Homo sapiens
tcccaatttgcttgtacttat

SEQ ID NO: 10878 - DNA, 21 bp, Homo sapiens
acagaatagattgtacggcaa

SEQ ID NO: 10879 - DNA, 21 bp, Homo sapiens
cccaatttgcttgtacttata

SEQ ID NO: 10880 - DNA, 21 bp, Homo sapiens
cagaatagattgtacggcaaa

SEQ ID NO: 10881 - DNA, 21 bp, Homo sapiens
cagggagggccttgaggacaa

SEQ ID NO: 10882 - DNA, 21 bp, Homo sapiens
tccggaatggcgcatgatgaa

SEQ ID NO: 10883 - DNA, 21 bp, Homo sapiens
cccgctgcagatcaactctca

SEQ ID NO: 10884 - DNA, 21 bp, Homo sapiens
accggaagagaaagcaattaa

SEQ ID NO: 10885 - DNA, 21 bp, Homo sapiens
ttgaggtttgttagtgaggaa

SEQ ID NO: 10886 - DNA, 21 bp, Homo sapiens
ttgcaatttggtccaactata

SEQ ID NO: 10887 - DNA, 21 bp, Homo sapiens
ctcctataacctctaggtaaa

SEQ ID NO: 10888 - DNA, 21 bp, Homo sapiens
accctgaattggagaccttaa

SEQ ID NO: 10889 - DNA, 21 bp, Homo sapiens
taccttaaccaagatgccaaa

SEQ ID NO: 10890 - DNA, 21 bp, Homo sapiens
accaagatgccaaattatcta

SEQ ID NO: 10891 - DNA, 21 bp, Homo sapiens
aagaacttctcatgtaatgta

SEQ ID NO: 10892 - DNA, 21 bp, Homo sapiens
taggcagtaatcaaagattaa

SEQ ID NO: 10893 - DNA, 21 bp, Homo sapiens
ccgctcttgtagggtaattaa

SEQ ID NO: 10894 - DNA, 21 bp, Homo sapiens
cagcttcgcggcagcagctaa

SEQ ID NO: 10895 - DNA, 21 bp, Homo sapiens
ttggagcaagtatgtacttaa

SEQ ID NO: 10896 - DNA, 21 bp, Homo sapiens
tagctacaagattcagcttta

SEQ ID NO: 10897 - DNA, 21 bp, Homo sapiens
atctcttatctccttgatata

SEQ ID NO: 10898 - DNA, 21 bp, Homo sapiens
accacatagcccagtgattaa

SEQ ID NO: 10899 - DNA, 21 bp, Homo sapiens
ctggcgtggtgtcaagtttaa

SEQ ID NO: 10900 - DNA, 21 bp, Homo sapiens
ccgagatgtgctgcgattata

SEQ ID NO: 10901 - DNA, 21 bp, Homo sapiens
acgcatgaacgacccagaata

SEQ ID NO: 10902 - DNA, 21 bp, Homo sapiens
caggacaataacgtcatgttt

SEQ ID NO: 10903 - DNA, 21 bp, Homo sapiens
cagattgtagatgacaatata

SEQ ID NO: 10904 - DNA, 21 bp, Homo sapiens
aaggatgaaattgaacgagaa

SEQ ID NO: 10905 - DNA, 21 bp, Homo sapiens
cagcaaacacattccatacaa

SEQ ID NO: 10906 - DNA, 21 bp, Homo sapiens
caagctcataaacgaacgcaa

SEQ ID NO: 10907 - DNA, 21 bp, Homo sapiens
atcagtattgcttatgaataa

SEQ ID NO: 10908 - DNA, 21 bp, Homo sapiens
aagcactttgaggaaccttaa

SEQ ID NO: 10909 - DNA, 21 bp, Homo sapiens
caggactggataaataattaa

SEQ ID NO: 10910 - DNA, 21 bp, Homo sapiens
acccaaatactttgtattcaa

SEQ ID NO: 10911 - DNA, 21 bp, Homo sapiens
ctccaacatgttgacagtgaa

SEQ ID NO: 10912 - DNA, 21 bp, Homo sapiens
ctgggtggcatgagaaaccaa

SEQ ID NO: 10913 - DNA, 21 bp, Homo sapiens
caggttcatctttgacttcaa

SEQ ID NO: 10914 - DNA, 21 bp, Homo sapiens
caggttgtatctccagataat

SEQ ID NO: 10915 - DNA, 21 bp, Homo sapiens
cagggtgcttgttctgttcaa

SEQ ID NO: 10916 - DNA, 21 bp, Homo sapiens
cccgtgctgaatgaatgtaca

SEQ ID NO: 10917 - DNA, 21 bp, Homo sapiens
tggaattacataagccctaaa

SEQ ID NO: 10918 - DNA, 21 bp, Homo sapiens
cacgcctattgtggacacttt

SEQ ID NO: 10919 - DNA, 21 bp, Homo sapiens
ccagcagatattactactata

SEQ ID NO: 10920 - DNA, 21 bp, Homo sapiens
cccaatggacggtatggaata

SEQ ID NO: 10921 - DNA, 21 bp, Homo sapiens
caccagtcacttaacttgtta

SEQ ID NO: 10922 - DNA, 21 bp, Homo sapiens
ccgggacatcgcctcacccaa

SEQ ID NO: 10923 - DNA, 21 bp, Homo sapiens
ctgcagcatcctcaccattaa

SEQ ID NO: 10924 - DNA, 21 bp, Homo sapiens
ttcactggttgtgtaaataaa

SEQ ID NO: 10925 - DNA, 21 bp, Homo sapiens
aaggatgtacataagattgaa

SEQ ID NO: 10926 - DNA, 21 bp, Homo sapiens
aagaagcaagtttctgagtaa

SEQ ID NO: 10927 - DNA, 21 bp, Homo sapiens
ttcatgtatgtaggagttaaa

SEQ ID NO: 10928 - DNA, 21 bp, Homo sapiens
acgcattctgtccaccatgaa

SEQ ID NO: 10929 - DNA, 21 bp, Homo sapiens
taggccaaactggagaaataa

SEQ ID NO: 10930 - DNA, 21 bp, Homo sapiens
aagagagatcctgaagactta

SEQ ID NO: 10931 - DNA, 21 bp, Homo sapiens
cagaccctttatcaacataaa

SEQ ID NO: 10932 - DNA, 21 bp, Homo sapiens
tagaccattgttaaataaata

SEQ ID NO: 10933 - DNA, 21 bp, Homo sapiens
ccgaaggttcatggagaagaa

SEQ ID NO: 10934 - DNA, 21 bp, Homo sapiens
caggaggagcgtgaacgagaa

SEQ ID NO: 10935 - DNA, 21 bp, Homo sapiens
aagcctcaacgcagaatcaaa

SEQ ID NO: 10936 - DNA, 21 bp, Homo sapiens
caaggttgcactattagtata

SEQ ID NO: 10937 - DNA, 21 bp, Homo sapiens
cacaatagtaccgatcagtta

SEQ ID NO: 10938 - DNA, 21 bp, Homo sapiens
atcagttaactcagcgctgaa

SEQ ID NO: 10939 - DNA, 21 bp, Homo sapiens
aaggagctagtttgcaataaa

SEQ ID NO: 10940 - DNA, 21 bp, Homo sapiens
ctgatccttagtaacatgtta

SEQ ID NO: 10941 - DNA, 21 bp, Homo sapiens
ttggatattcttcataattca

SEQ ID NO: 10942 - DNA, 21 bp, Homo sapiens
atggaagatttaactaatgta

SEQ ID NO: 10943 - DNA, 21 bp, Homo sapiens
ctggcacgggatataatagaa

SEQ ID NO: 10944 - DNA, 21 bp, Homo sapiens
caaggcgtttactgagattaa

SEQ ID NO: 10945 - DNA, 21 bp, Homo sapiens
cagtgtcttatgaaacatgta

SEQ ID NO: 10946 - DNA, 21 bp, Homo sapiens
agggccttgattgttatgtaa

SEQ ID NO: 10947 - DNA, 21 bp, Homo sapiens
ccgcctgggtatccttcggaa

SEQ ID NO: 10948 - DNA, 21 bp, Homo sapiens
ccgcagcgctttgctcagcta

SEQ ID NO: 10949 - DNA, 21 bp, Homo sapiens
cacaccttatctaagtctgaa

SEQ ID NO: 10950 - DNA, 21 bp, Homo sapiens
atagcctaacatttattgtaa

SEQ ID NO: 10951 - DNA, 21 bp, Homo sapiens
ctggttcttcttgaagatgta

SEQ ID NO: 10952 - DNA, 21 bp, Homo sapiens
ccagtgtgaaatgttactaaa

SEQ ID NO: 10953 - DNA, 21 bp, Homo sapiens
aacccggatattgtctgtcaa

SEQ ID NO: 10954 - DNA, 21 bp, Homo sapiens
aagaaacttcttagagattca

SEQ ID NO: 10955 - DNA, 21 bp, Homo sapiens
caggcagctcgcgaacacaaa

SEQ ID NO: 10956 - DNA, 21 bp, Homo sapiens
acggcaagtcttaggagggaa

SEQ ID NO: 10957 - DNA, 21 bp, Homo sapiens
cccaatcagtatgctgaatca

SEQ ID NO: 10958 - DNA, 21 bp, Homo sapiens
ctcggtgttcagtggtgtata

SEQ ID NO: 10959 - DNA, 21 bp, Homo sapiens
ctcatggaaattacaattaaa

SEQ ID NO: 10960 - DNA, 21 bp, Homo sapiens
aaggaaatgcatgtaaagtaa

SEQ ID NO: 10961 - DNA, 21 bp, Homo sapiens
acccagaaacttgatgagaaa

SEQ ID NO: 10962 - DNA, 21 bp, Homo sapiens
aaggaagaaagtgaagcttga

SEQ ID NO: 10963 - DNA, 21 bp, Homo sapiens
caaggatgcaaattcaattaa

SEQ ID NO: 10964 - DNA, 21 bp, Homo sapiens
tcccaggtttataatgatgca

SEQ ID NO: 10965 - DNA, 21 bp, Homo sapiens
ccggagtctttgatctacaaa

SEQ ID NO: 10966 - DNA, 21 bp, Homo sapiens
caggcttacatcgcacataca

SEQ ID NO: 10967 - DNA, 21 bp, Homo sapiens
ctccgtttacttgatctgcga

SEQ ID NO: 10968 - DNA, 21 bp, Homo sapiens
gaggtgaagtgaccaaatgaa

SEQ ID NO: 10969 - DNA, 21 bp, Homo sapiens
aaggcagaggagtatgttcaa

SEQ ID NO: 10970 - DNA, 21 bp, Homo sapiens
cccacagaaagttgtgcataa

SEQ ID NO: 10971 - DNA, 21 bp, Homo sapiens
caggttcaactttgataataa

SEQ ID NO: 10972 - DNA, 21 bp, Homo sapiens
ctggatgaacttatcgatgaa

SEQ ID NO: 10973 - DNA, 21 bp, Homo sapiens
cagaatctcagcagaagccaa

SEQ ID NO: 10974 - DNA, 21 bp, Homo sapiens
gtgggtaaatttggaaggcaa

SEQ ID NO: 10975 - DNA, 21 bp, Homo sapiens
atcctctttgtttatattgaa

SEQ ID NO: 10976 - DNA, 21 bp, Homo sapiens
caggctggaacaagacattaa

SEQ ID NO: 10977 - DNA, 21 bp, Homo sapiens
caggtgtatggtagtaagtaa

SEQ ID NO: 10978 - DNA, 21 bp, Homo sapiens
caccatgactagtaaatgtaa

SEQ ID NO: 10979 - DNA, 21 bp, Homo sapiens
cagaatgttcaaataccttta

SEQ ID NO: 10980 - DNA, 21 bp, Homo sapiens
caggttgttctggaattgata

SEQ ID NO: 10981 - DNA, 21 bp, Homo sapiens
ccggattgccttcatcctgta

SEQ ID NO: 10982 - DNA, 21 bp, Homo sapiens
ttgcctgacagtgttcttaaa

SEQ ID NO: 10983 - DNA, 21 bp, Homo sapiens
ctgggaggaaagagagataaa

SEQ ID NO: 10984 - DNA, 21 bp, Homo sapiens
ccgggtcatgaaggccatcta

SEQ ID NO: 10985 - DNA, 21 bp, Homo sapiens
tcggatatacagcatattcca

SEQ ID NO: 10986 - DNA, 21 bp, Homo sapiens
aaggattatgcgacacaataa

SEQ ID NO: 10987 - DNA, 21 bp, Homo sapiens
cctggatattctaacagtgaa

SEQ ID NO: 10988 - DNA, 21 bp, Homo sapiens
acggattcatttcggaatgaa

SEQ ID NO: 10989 - DNA, 21 bp, Homo sapiens
aagccttaaatgtttaagtaa

SEQ ID NO: 10990 - DNA, 21 bp, Homo sapiens
aacaggagtattagtacataa

SEQ ID NO: 10991 - DNA, 21 bp, Homo sapiens
ctcggattagcaagcaataaa

SEQ ID NO: 10992 - DNA, 21 bp, Homo sapiens
tcgtgtgactgcgaacattaa

SEQ ID NO: 10993 - DNA, 21 bp, Homo sapiens
aaggttatcaaattcacttaa

SEQ ID NO: 10994 - DNA, 21 bp, Homo sapiens
aagggcatgtagtttaattaa

SEQ ID NO: 10995 - DNA, 21 bp, Homo sapiens
aacaagtaatccctagtacta

SEQ ID NO: 10996 - DNA, 21 bp, Homo sapiens
tagcgtaacatgatacatcta

SEQ ID NO: 10997 - DNA, 21 bp, Homo sapiens
acgaattacagaccattataa

SEQ ID NO: 10998 - DNA, 21 bp, Homo sapiens
cggacagttccaggaatatta

SEQ ID NO: 10999 - DNA, 21 bp, Homo sapiens
tccagggaagacagaaatcaa

SEQ ID NO: 11000 - DNA, 21 bp, Homo sapiens
atggcagtgtatggaatgtaa

SEQ ID NO: 11001 - DNA, 21 bp, Homo sapiens
aaggagatttagatcaaccaa

SEQ ID NO: 11002 - DNA, 21 bp, Homo sapiens
acccgtgatattaagcaatta

SEQ ID NO: 11003 - DNA, 21 bp, Homo sapiens
tcagttaatcttcgcagtaaa

SEQ ID NO: 11004 - DNA, 21 bp, Homo sapiens
cagacagttcgtcatcaagaa

SEQ ID NO: 11005 - DNA, 21 bp, Homo sapiens
atgactttactctgactataa

SEQ ID NO: 11006 - DNA, 21 bp, Homo sapiens
ctgatacatacgaaacaatta

SEQ ID NO: 11007 - DNA, 21 bp, Homo sapiens
aaggttaacagcatgaattaa

SEQ ID NO: 11008 - DNA, 21 bp, Homo sapiens
ctggttatagtgggaatataa

SEQ ID NO: 11009 - DNA, 21 bp, Homo sapiens
aagaattaacctcctatctta

SEQ ID NO: 11010 - DNA, 21 bp, Homo sapiens
cacgggcatcgtacaggtgta

SEQ ID NO: 11011 - DNA, 21 bp, Homo sapiens
aagcatcatatttgaaggaaa

SEQ ID NO: 11012 - DNA, 21 bp, Homo sapiens
cagagcttctttaaagcataa

SEQ ID NO: 11013 - DNA, 21 bp, Homo sapiens
atcaaggaagagaaagtcaaa

SEQ ID NO: 11014 - DNA, 21 bp, Homo sapiens
gggaattatgctgttcattta

SEQ ID NO: 11015 - DNA, 21 bp, Homo sapiens
taggttatcagtaacaattta

SEQ ID NO: 11016 - DNA, 21 bp, Homo sapiens
atcctttgtttcataaagtaa

SEQ ID NO: 11017 - DNA, 21 bp, Homo sapiens
caccggagtaagaaactacaa

SEQ ID NO: 11018 - DNA, 21 bp, Homo sapiens
cccacagtcatcgaaacacaa

SEQ ID NO: 11019 - DNA, 21 bp, Homo sapiens
cagggaaatagccaggtgcta

SEQ ID NO: 11020 - DNA, 21 bp, Homo sapiens
cccaagtggctgctatgtaaa

SEQ ID NO: 11021 - DNA, 21 bp, Homo sapiens
tcggttggaatcatctggcaa

SEQ ID NO: 11022 - DNA, 21 bp, Homo sapiens
cgaggctcgacttaaggcaaa

SEQ ID NO: 11023 - DNA, 21 bp, Homo sapiens
aaggatgtatagagtctcaaa

SEQ ID NO: 11024 - DNA, 21 bp, Homo sapiens
ctggaaattctacaactgaaa

SEQ ID NO: 11025 - DNA, 21 bp, Homo sapiens
gcccaagagtgttattctcaa

SEQ ID NO: 11026 - DNA, 21 bp, Homo sapiens
ccgattagactaaggagacta

SEQ ID NO: 11027 - DNA, 21 bp, Homo sapiens
ttcaccttaggtatagataaa

SEQ ID NO: 11028 - DNA, 21 bp, Homo sapiens
ctgggctgcaagatatcaata

SEQ ID NO: 11029 - DNA, 21 bp, Homo sapiens
tccaaagatatcggaccctaa

SEQ ID NO: 11030 - DNA, 21 bp, Homo sapiens
tccgcacacaatcatagagaa

SEQ ID NO: 11031 - DNA, 21 bp, Homo sapiens
ccgcatcgggctaccaccaaa

SEQ ID NO: 11032 - DNA, 21 bp, Homo sapiens
acgcaaatgtatgaataacaa

SEQ ID NO: 11033 - DNA, 21 bp, Homo sapiens
caggatggattctgaaatata

SEQ ID NO: 11034 - DNA, 21 bp, Homo sapiens
aagaagaggaatgaacattaa

SEQ ID NO: 11035 - DNA, 21 bp, Homo sapiens
cacacttgggccaataactaa

SEQ ID NO: 11036 - DNA, 21 bp, Homo sapiens
tccagctagattgcagtttaa

SEQ ID NO: 11037 - DNA, 21 bp, Homo sapiens
taggtgtagtagagcaatata

SEQ ID NO: 11038 - DNA, 21 bp, Homo sapiens
taggatttcatagtaattcta

SEQ ID NO: 11039 - DNA, 21 bp, Homo sapiens
caggatttacatgggtataat

SEQ ID NO: 11040 - DNA, 21 bp, Homo sapiens
atgctgttacagaaactgaaa

SEQ ID NO: 11041 - DNA, 21 bp, Homo sapiens
ccagtggaactcacacagtaa

SEQ ID NO: 11042 - DNA, 21 bp, Homo sapiens
caggaacactggtaactataa

SEQ ID NO: 11043 - DNA, 21 bp, Homo sapiens
cagcagaagctacttcaggaa

SEQ ID NO: 11044 - DNA, 21 bp, Homo sapiens
caggcctgcattactccttca

SEQ ID NO: 11045 - DNA, 21 bp, Homo sapiens
gaggagtagcatgaacgccaa

SEQ ID NO: 11046 - DNA, 21 bp, Homo sapiens
ctgcatgtcagagcactttaa

SEQ ID NO: 11047 - DNA, 21 bp, Homo sapiens
aagggagctgtttaaatttaa

SEQ ID NO: 11048 - DNA, 21 bp, Homo sapiens
ctggtatttcatgcagaagta

SEQ ID NO: 11049 - DNA, 21 bp, Homo sapiens
atgagtggaattactaggtaa

SEQ ID NO: 11050 - DNA, 21 bp, Homo sapiens
atgaattggctcagtatttaa

SEQ ID NO: 11051 - DNA, 21 bp, Homo sapiens
cccatgaaagccagagctaaa

SEQ ID NO: 11052 - DNA, 21 bp, Homo sapiens
cccggccaaaccctcagtgaa

SEQ ID NO: 11053 - DNA, 21 bp, Homo sapiens
ctgacttatggcaacactaaa

SEQ ID NO: 11054 - DNA, 21 bp, Homo sapiens
cagcagctttggagacacaaa

SEQ ID NO: 11055 - DNA, 21 bp, Homo sapiens
cacagtcattatattgttatt

SEQ ID NO: 11056 - DNA, 21 bp, Homo sapiens
ccggcccgtgtacacactcaa

SEQ ID NO: 11057 - DNA, 21 bp, Homo sapiens
ctcgccgcctaccaacttcaa

SEQ ID NO: 11058 - DNA, 21 bp, Homo sapiens
cgccggtggctttgcactcta

SEQ ID NO: 11059 - DNA, 21 bp, Homo sapiens
cccgctagttgtcaacatgta

SEQ ID NO: 11060 - DNA, 21 bp, Homo sapiens
cagctttctacggaacatcaa

SEQ ID NO: 11061 - DNA, 21 bp, Homo sapiens
ctgaagttaagcagaaattaa

SEQ ID NO: 11062 - DNA, 21 bp, Homo sapiens
aaagatgattatgtatttgaa

SEQ ID NO: 11063 - DNA, 21 bp, Homo sapiens
ctcagacaagattacaatgaa

SEQ ID NO: 11064 - DNA, 21 bp, Homo sapiens
cccggtgatccctgtggtcta

SEQ ID NO: 11065 - DNA, 21 bp, Homo sapiens
ctgcgggatttgttcagttca

SEQ ID NO: 11066 - DNA, 21 bp, Homo sapiens
acccagtagctagaatgttaa

SEQ ID NO: 11067 - DNA, 21 bp, Homo sapiens
cccagtgtcagtatttataaa

SEQ ID NO: 11068 - DNA, 21 bp, Homo sapiens
aagggtatttgctacctttaa

SEQ ID NO: 11069 - DNA, 21 bp, Homo sapiens
cagcaggaccgaattcagcaa

SEQ ID NO: 11070 - DNA, 21 bp, Homo sapiens
cagggcttcactgaattcaca

SEQ ID NO: 11071 - DNA, 21 bp, Homo sapiens
aaggatcgtctctgtggctaa

SEQ ID NO: 11072 - DNA, 21 bp, Homo sapiens
ccaggagagaaggacacgcaa

SEQ ID NO: 11073 - DNA, 21 bp, Homo sapiens
acgccggaatgtccagctcaa

SEQ ID NO: 11074 - DNA, 21 bp, Homo sapiens
cagcatcagcgctgacttcta

SEQ ID NO: 11075 - DNA, 21 bp, Homo sapiens
aagccatattcttaaattcaa

SEQ ID NO: 11076 - DNA, 21 bp, Homo sapiens
ccgcaggtgtatttacggtaa

SEQ ID NO: 11077 - DNA, 21 bp, Homo sapiens
tgcgtagaatttagagttata

SEQ ID NO: 11078 - DNA, 21 bp, Homo sapiens
ctcctaatgaatgctaaataa

SEQ ID NO: 11079 - DNA, 21 bp, Homo sapiens
taggctgtcgtctgccatcaa

SEQ ID NO: 11080 - DNA, 21 bp, Homo sapiens
cagtggtacttaagtattcaa

SEQ ID NO: 11081 - DNA, 21 bp, Homo sapiens
ctgaaggtttagtatattaga

SEQ ID NO: 11082 - DNA, 21 bp, Homo sapiens
aagatgtaaactcttgcataa

SEQ ID NO: 11083 - DNA, 21 bp, Homo sapiens
acaagtttatgtagtacttaa

SEQ ID NO: 11084 - DNA, 21 bp, Homo sapiens
cccaatggccctgtttattaa

SEQ ID NO: 11085 - DNA, 21 bp, Homo sapiens
aacgacattaagtgataaata

SEQ ID NO: 11086 - DNA, 21 bp, Homo sapiens
ctcattacattggacattaaa

SEQ ID NO: 11087 - DNA, 21 bp, Homo sapiens
aaggaatattatagccactta

SEQ ID NO: 11088 - DNA, 21 bp, Homo sapiens
tagattaatctgtatggtcaa

SEQ ID NO: 11089 - DNA, 21 bp, Homo sapiens
cagggattagttaacaataca

SEQ ID NO: 11090 - DNA, 21 bp, Homo sapiens
taccattggtattataataaa

SEQ ID NO: 11091 - DNA, 21 bp, Homo sapiens
atcagatattctaaacttaaa

SEQ ID NO: 11092 - DNA, 21 bp, Homo sapiens
aaaggtattaacaaatgttta

SEQ ID NO: 11093 - DNA, 21 bp, Homo sapiens
ccgcatcaggttctcagtcaa

SEQ ID NO: 11094 - DNA, 21 bp, Homo sapiens
cacgctatacaccgccaagaa

SEQ ID NO: 11095 - DNA, 21 bp, Homo sapiens
ctggaccacgggaaagagata

SEQ ID NO: 11096 - DNA, 21 bp, Homo sapiens
ctggagggactaataagatca

SEQ ID NO: 11097 - DNA, 21 bp, Homo sapiens
tagcaaagctatagactccaa

SEQ ID NO: 11098 - DNA, 21 bp, Homo sapiens
ccaggatgactcagcaataaa

SEQ ID NO: 11099 - DNA, 21 bp, Homo sapiens
ctggagcttcatttccttcaa

SEQ ID NO: 11100 - DNA, 21 bp, Homo sapiens
gtgaggaatctttgtacttaa

SEQ ID NO: 11101 - DNA, 21 bp, Homo sapiens
cactgtgaacttctggtataa

SEQ ID NO: 11102 - DNA, 21 bp, Homo sapiens
cacccacaagttcttgtacta

SEQ ID NO: 11103 - DNA, 21 bp, Homo sapiens
caagctcaagccatacataaa

SEQ ID NO: 11104 - DNA, 21 bp, Homo sapiens
aacacataggcttgcgtctta

SEQ ID NO: 11105 - DNA, 21 bp, Homo sapiens
cccaatgtcgatggacaggaa

SEQ ID NO: 11106 - DNA, 21 bp, Homo sapiens
aaattccactttcataataaa

SEQ ID NO: 11107 - DNA, 21 bp, Homo sapiens
cagcacaataatgttcttaaa

SEQ ID NO: 11108 - DNA, 21 bp, Homo sapiens
cagcttgagatggaaattcaa

SEQ ID NO: 11109 - DNA, 21 bp, Homo sapiens
acccagcaagaaattattgaa

SEQ ID NO: 11110 - DNA, 21 bp, Homo sapiens
aaggcttgttatagtcactta

SEQ ID NO: 11111 - DNA, 21 bp, Homo sapiens
aagaattatgttgaagaatta

SEQ ID NO: 11112 - DNA, 21 bp, Homo sapiens
caggatgtagagaatgagcta

SEQ ID NO: 11113 - DNA, 21 bp, Homo sapiens
ccggatgcttgtgtcatccaa

SEQ ID NO: 11114 - DNA, 21 bp, Homo sapiens
ccgacctgcctttatgataaa

SEQ ID NO: 11115 - DNA, 21 bp, Homo sapiens
ctgacagagatggatctgcta

SEQ ID NO: 11116 - DNA, 21 bp, Homo sapiens
aacgaaagagtttgtaaagaa

SEQ ID NO: 11117 - DNA, 21 bp, Homo sapiens
cccggaggaaactaacctcaa

SEQ ID NO: 11118 - DNA, 21 bp, Homo sapiens
cccggtgcagatgaacctgta

SEQ ID NO: 11119 - DNA, 21 bp, Homo sapiens
cagtcgttcaatatatgtaaa

SEQ ID NO: 11120 - DNA, 21 bp, Homo sapiens
accgaattatacaaacaatat

SEQ ID NO: 11121 - DNA, 21 bp, Homo sapiens
accactgagcatattgttaaa

SEQ ID NO: 11122 - DNA, 21 bp, Homo sapiens
aagagtcttcctataaagtaa

SEQ ID NO: 11123 - DNA, 21 bp, Homo sapiens
ctggagcagcttccaacacta

SEQ ID NO: 11124 - DNA, 21 bp, Homo sapiens
tgcgaggtgatcagaaggcaa

SEQ ID NO: 11125 - DNA, 21 bp, Homo sapiens
caggttgggttgataatataa

SEQ ID NO: 11126 - DNA, 21 bp, Homo sapiens
caggatgacaaagctcatgaa

SEQ ID NO: 11127 - DNA, 21 bp, Homo sapiens
caggaggtggataaagtacta

SEQ ID NO: 11128 - DNA, 21 bp, Homo sapiens
ccgcggagagatcgagctgaa

SEQ ID NO: 11129 - DNA, 21 bp, Homo sapiens
caggatttctaaagcacacca

SEQ ID NO: 11130 - DNA, 21 bp, Homo sapiens
caggtagcagatcaaccttat

SEQ ID NO: 11131 - DNA, 21 bp, Homo sapiens
cagcctggctttcaatggaaa

SEQ ID NO: 11132 - DNA, 21 bp, Homo sapiens
ctgggtttgatgctttgtcaa

SEQ ID NO: 11133 - DNA, 21 bp, Homo sapiens
aaggacatggagcggcattta

SEQ ID NO: 11134 - DNA, 21 bp, Homo sapiens
cagcagtttaacaacctggat

SEQ ID NO: 11135 - DNA, 21 bp, Homo sapiens
aacagtgattaacaagctgaa

SEQ ID NO: 11136 - DNA, 21 bp, Homo sapiens
tcaccacgccatgaaattcaa

SEQ ID NO: 11137 - DNA, 21 bp, Homo sapiens
tcccgtggagcggatctgtaa

SEQ ID NO: 11138 - DNA, 21 bp, Homo sapiens
aaccagaggtttgacatggaa

SEQ ID NO: 11139 - DNA, 21 bp, Homo sapiens
atcgatggcgatgaactataa

SEQ ID NO: 11140 - DNA, 21 bp, Homo sapiens
accggataacacggccttcaa

SEQ ID NO: 11141 - DNA, 21 bp, Homo sapiens
ctcgagatgatagtcaactaa

SEQ ID NO: 11142 - DNA, 21 bp, Homo sapiens
aacgatttaaaggtacaacaa

SEQ ID NO: 11143 - DNA, 21 bp, Homo sapiens
atggatcaggtaactacttaa

SEQ ID NO: 11144 - DNA, 21 bp, Homo sapiens
acgccttatctttgaaattca

SEQ ID NO: 11145 - DNA, 21 bp, Homo sapiens
acgcaatttaaatgtgatata

SEQ ID NO: 11146 - DNA, 21 bp, Homo sapiens
aaggagagtaatacaggagaa

SEQ ID NO: 11147 - DNA, 21 bp, Homo sapiens
ctgagattaatagaaattgaa

SEQ ID NO: 11148 - DNA, 21 bp, Homo sapiens
aactatcactttcaacattaa

SEQ ID NO: 11149 - DNA, 21 bp, Homo sapiens
ctcataaatggttatccacta

SEQ ID NO: 11150 - DNA, 21 bp, Homo sapiens
gagctatgaatcagtatagaa

SEQ ID NO: 11151 - DNA, 21 bp, Homo sapiens
cgcggttgaaatgggcatgaa

SEQ ID NO: 11152 - DNA, 21 bp, Homo sapiens
aacgcgattatcataaacata

SEQ ID NO: 11153 - DNA, 21 bp, Homo sapiens
tccagttgtttcagagcttaa

SEQ ID NO: 11154 - DNA, 21 bp, Homo sapiens
tagcaccatgactaagcataa

SEQ ID NO: 11155 - DNA, 21 bp, Homo sapiens
cagggcaatgaggaacaacta

SEQ ID NO: 11156 - DNA, 21 bp, Homo sapiens
cacgtacttgatcactttgta

SEQ ID NO: 11157 - DNA, 21 bp, Homo sapiens
aaggatgattctgatctattt

SEQ ID NO: 11158 - DNA, 21 bp, Homo sapiens
aaagcgtattctgaatttata

SEQ ID NO: 11159 - DNA, 21 bp, Homo sapiens
aacttaatttaaagtatgtaa

SEQ ID NO: 11160 - DNA, 21 bp, Homo sapiens
aagcagcatggctcaaagcaa

SEQ ID NO: 11161 - DNA, 21 bp, Homo sapiens
caagtacattgtgtcaactta

SEQ ID NO: 11162 - DNA, 21 bp, Homo sapiens
cagtgtgaacttagtacttaa

SEQ ID NO: 11163 - DNA, 21 bp, Homo sapiens
caggatacattaatacatcta

SEQ ID NO: 11164 - DNA, 21 bp, Homo sapiens
ctggagcagaataagtctaaa

SEQ ID NO: 11165 - DNA, 21 bp, Homo sapiens
ctcaaagatcttaatgagtaa

SEQ ID NO: 11166 - DNA, 21 bp, Homo sapiens
ccgctaaacactattattcta

SEQ ID NO: 11167 - DNA, 21 bp, Homo sapiens
cacgcattggatattcattta

SEQ ID NO: 11168 - DNA, 21 bp, Homo sapiens
ctggccatttatgaagatgaa

SEQ ID NO: 11169 - DNA, 21 bp, Homo sapiens
cagagcaaggatagaaattaa

SEQ ID NO: 11170 - DNA, 21 bp, Homo sapiens
aaggttcttaatgaatgtcta

SEQ ID NO: 11171 - DNA, 21 bp, Homo sapiens
ccgcacgcagatggaactcaa

SEQ ID NO: 11172 - DNA, 21 bp, Homo sapiens
caggagggactttgaaatgca

SEQ ID NO: 11173 - DNA, 21 bp, Homo sapiens
cagaatgatgtcgtccgaatt

SEQ ID NO: 11174 - DNA, 21 bp, Homo sapiens
ctgtcctatgtgcaaacttaa

SEQ ID NO: 11175 - DNA, 21 bp, Homo sapiens
caagctgttaaccgaagatca

SEQ ID NO: 11176 - DNA, 21 bp, Homo sapiens
tccgagaacaggagaaatcaa

SEQ ID NO: 11177 - DNA, 21 bp, Homo sapiens
aaggagatttatggacttcaa

SEQ ID NO: 11178 - DNA, 21 bp, Homo sapiens
ctggcggatgaggctaagaat

SEQ ID NO: 11179 - DNA, 21 bp, Homo sapiens
aacccttaaccctcgattcaa

SEQ ID NO: 11180 - DNA, 21 bp, Homo sapiens
aggcctctagatgattagcaa

SEQ ID NO: 11181 - DNA, 21 bp, Homo sapiens
taccgagatctcaaacataaa

SEQ ID NO: 11182 - DNA, 21 bp, Homo sapiens
cagacagactatagactataa

SEQ ID NO: 11183 - DNA, 21 bp, Homo sapiens
taggctctaattagtcagcaa

SEQ ID NO: 11184 - DNA, 21 bp, Homo sapiens
ctgcctttcatttgtaactaa

SEQ ID NO: 11185 - DNA, 21 bp, Homo sapiens
ccggagaaagtgaatcatcta

SEQ ID NO: 11186 - DNA, 21 bp, Homo sapiens
atgaattgttctattaacaaa

SEQ ID NO: 11187 - DNA, 21 bp, Homo sapiens
ccgctccattaagaacagtga

SEQ ID NO: 11188 - DNA, 21 bp, Homo sapiens
ttcatccatatccgatgtaaa

SEQ ID NO: 11189 - DNA, 21 bp, Homo sapiens
taggtggttaccacaacagaa

SEQ ID NO: 11190 - DNA, 21 bp, Homo sapiens
cagagactacctgtcggtgaa

SEQ ID NO: 11191 - DNA, 21 bp, Homo sapiens
ctgcttggcttccacctttaa

SEQ ID NO: 11192 - DNA, 21 bp, Homo sapiens
aaaggagttcatgcttatgaa

SEQ ID NO: 11193 - DNA, 21 bp, Homo sapiens
tcgaatcatgcctaaactcaa

SEQ ID NO: 11194 - DNA, 21 bp, Homo sapiens
accggcctctgaggtgatcaa

SEQ ID NO: 11195 - DNA, 21 bp, Homo sapiens
ctcccaggacaggctccttaa

SEQ ID NO: 11196 - DNA, 21 bp, Homo sapiens
acagaacagagccaaatcaaa

SEQ ID NO: 11197 - DNA, 21 bp, Homo sapiens
ctcgcccaaagaagactacaa

SEQ ID NO: 11198 - DNA, 21 bp, Homo sapiens
cacagaacagagccaaatcaa

SEQ ID NO: 11199 - DNA, 21 bp, Homo sapiens
caggctgtcgtatcaatgcaa

SEQ ID NO: 11200 - DNA, 21 bp, Homo sapiens
ccgagatgatgggaatatcaa

SEQ ID NO: 11201 - DNA, 21 bp, Homo sapiens
tcgactgttatctcacattaa

SEQ ID NO: 11202 - DNA, 21 bp, Homo sapiens
acggtagttcttgcaattatt

SEQ ID NO: 11203 - DNA, 21 bp, Homo sapiens
aacgctgtaaactgtaacatt

SEQ ID NO: 11204 - DNA, 21 bp, Homo sapiens
tcagtagttattagactctaa

SEQ ID NO: 11205 - DNA, 21 bp, Homo sapiens
ctcattctccttgggctgtaa

SEQ ID NO: 11206 - DNA, 21 bp, Homo sapiens
aagtgtggcttgcgtaaataa

SEQ ID NO: 11207 - DNA, 21 bp, Homo sapiens
cacgttaattcggaagctaga

SEQ ID NO: 11208 - DNA, 21 bp, Homo sapiens
cggaagctagagggccatcaa

SEQ ID NO: 11209 - DNA, 21 bp, Homo sapiens
cacggcttcttacgataccaa

SEQ ID NO: 11210 - DNA, 21 bp, Homo sapiens
aaagatgtcttaattgtgtaa

SEQ ID NO: 11211 - DNA, 21 bp, Homo sapiens
caggagagactgtgtgaacaa

SEQ ID NO: 11212 - DNA, 21 bp, Homo sapiens
cggacgggacggagcagtgga

SEQ ID NO: 11213 - DNA, 21 bp, Homo sapiens
taccattgggttcctaattaa

SEQ ID NO: 11214 - DNA, 21 bp, Homo sapiens
caggtcatggaggaatcataa

SEQ ID NO: 11215 - DNA, 21 bp, Homo sapiens
acccatagggctagacacttt

SEQ ID NO: 11216 - DNA, 21 bp, Homo sapiens
cacgagctgcgccgctttcta

SEQ ID NO: 11217 - DNA, 21 bp, Homo sapiens
ctgcctaatgtgaatttattt

SEQ ID NO: 11218 - DNA, 21 bp, Homo sapiens
gtgaatttatttatttgtgaa

SEQ ID NO: 11219 - DNA, 21 bp, Homo sapiens
ccgagaatttgaggtcttaaa

SEQ ID NO: 11220 - DNA, 21 bp, Homo sapiens
acggctgacaaaggccaggaa

SEQ ID NO: 11221 - DNA, 21 bp, Homo sapiens
ctgcagtaactcgaagtacaa

SEQ ID NO: 11222 - DNA, 21 bp, Homo sapiens
caagtttgattcaaatcataa

SEQ ID NO: 11223 - DNA, 21 bp, Homo sapiens
caagatgttatcaattggtta

SEQ ID NO: 11224 - DNA, 21 bp, Homo sapiens
cccgaagagccaaatataata

SEQ ID NO: 11225 - DNA, 21 bp, Homo sapiens
aaggaaagaatttgaagtcca

SEQ ID NO: 11226 - DNA, 21 bp, Homo sapiens
cagatgggttattgcagatta

SEQ ID NO: 11227 - DNA, 21 bp, Homo sapiens
ctggcagttccagaacattta

SEQ ID NO: 11228 - DNA, 21 bp, Homo sapiens
acccaggtatatgttactaaa

SEQ ID NO: 11229 - DNA, 21 bp, Homo sapiens
tcgcttatttctggaatgtaa

SEQ ID NO: 11230 - DNA, 21 bp, Homo sapiens
caagatgtcaattgaatacaa

SEQ ID NO: 11231 - DNA, 21 bp, Homo sapiens
gcggatgtacgggacattcta

SEQ ID NO: 11232 - DNA, 21 bp, Homo sapiens
cagctttatctccacgatgat

SEQ ID NO: 11233 - DNA, 21 bp, Homo sapiens
ctccatggagacgatttacaa

SEQ ID NO: 11234 - DNA, 21 bp, Homo sapiens
tcggtgctacatcctagagaa

SEQ ID NO: 11235 - DNA, 21 bp, Homo sapiens
tcgaaagtggccagaaatgaa

SEQ ID NO: 11236 - DNA, 21 bp, Homo sapiens
atgacagattctggaggataa

SEQ ID NO: 11237 - DNA, 21 bp, Homo sapiens
cagtaaatgcttgacaagtaa

SEQ ID NO: 11238 - DNA, 21 bp, Homo sapiens
caccagcatgttgtacggaaa

SEQ ID NO: 11239 - DNA, 21 bp, Homo sapiens
tggattcagatgaaacattaa

SEQ ID NO: 11240 - DNA, 21 bp, Homo sapiens
ctggattcagatgaaacatta

SEQ ID NO: 11241 - DNA, 21 bp, Homo sapiens
ctggagtaaagacaccttcaa

SEQ ID NO: 11242 - DNA, 21 bp, Homo sapiens
ttcctggaaactgatcttcaa

SEQ ID NO: 11243 - DNA, 21 bp, Homo sapiens
caggaagctagtgaaatgaca

SEQ ID NO: 11244 - DNA, 21 bp, Homo sapiens
aaagtatactctaccattaaa

SEQ ID NO: 11245 - DNA, 21 bp, Homo sapiens
ctgaatttgattcagaatgaa

SEQ ID NO: 11246 - DNA, 21 bp, Homo sapiens
ccagttgagtttcactatgaa

SEQ ID NO: 11247 - DNA, 21 bp, Homo sapiens
caacggatttaccgagttaaa

SEQ ID NO: 11248 - DNA, 21 bp, Homo sapiens
acggaatagaaatagaagtaa

SEQ ID NO: 11249 - DNA, 21 bp, Homo sapiens
aacatcctgatggaagataaa

SEQ ID NO: 11250 - DNA, 21 bp, Homo sapiens
aaggattagattatgaagaaa

SEQ ID NO: 11251 - DNA, 21 bp, Homo sapiens
tcagattataatatcacttta

SEQ ID NO: 11252 - DNA, 21 bp, Homo sapiens
cagattataatatcactttaa

SEQ ID NO: 11253 - DNA, 21 bp, Homo sapiens
aagctacacaataaatccgaa

SEQ ID NO: 11254 - DNA, 21 bp, Homo sapiens
ctccaggtcaaataagttcaa

SEQ ID NO: 11255 - DNA, 21 bp, Homo sapiens
ccggaactagtactggataaa

SEQ ID NO: 11256 - DNA, 21 bp, Homo sapiens
atggacacaaatatagactaa

SEQ ID NO: 11257 - DNA, 21 bp, Homo sapiens
cacaattgagatacaggttaa

SEQ ID NO: 11258 - DNA, 21 bp, Homo sapiens
aaagtccaaatttataattaa

SEQ ID NO: 11259 - DNA, 21 bp, Homo sapiens
caggagagactccgaactcca

SEQ ID NO: 11260 - DNA, 21 bp, Homo sapiens
cggagctattgtagcaggcaa

SEQ ID NO: 11261 - DNA, 21 bp, Homo sapiens
caggataaatcggccagcaaa

SEQ ID NO: 11262 - DNA, 21 bp, Homo sapiens
ttggagagttatgctaagcaa

SEQ ID NO: 11263 - DNA, 21 bp, Homo sapiens
tcggaaggcaatatattagaa

SEQ ID NO: 11264 - DNA, 21 bp, Homo sapiens
cgggctaatatcattcgatca

SEQ ID NO: 11265 - DNA, 21 bp, Homo sapiens
cacgctctgtttcgtgatgtt

SEQ ID NO: 11266 - DNA, 21 bp, Homo sapiens
cacggagttcgaaaccatcta

SEQ ID NO: 11267 - DNA, 21 bp, Homo sapiens
atcaatgaacattgtacctta

SEQ ID NO: 11268 - DNA, 21 bp, Homo sapiens
ttgaatgtaaggctcagtaaa

SEQ ID NO: 11269 - DNA, 21 bp, Homo sapiens
cagcaccataacccaaatgaa

SEQ ID NO: 11270 - DNA, 21 bp, Homo sapiens
cacattgttgtggaagaataa

SEQ ID NO: 11271 - DNA, 21 bp, Homo sapiens
cggcaccaacttcacattcaa

SEQ ID NO: 11272 - DNA, 21 bp, Homo sapiens
cagcctgacctggcatgtcaa

SEQ ID NO: 11273 - DNA, 21 bp, Homo sapiens
ctccaataacagccaggttta

SEQ ID NO: 11274 - DNA, 21 bp, Homo sapiens
caaggtagtcttgtgaagaaa

SEQ ID NO: 11275 - DNA, 21 bp, Homo sapiens
ctgggtcttgaactactttaa

SEQ ID NO: 11276 - DNA, 21 bp, Homo sapiens
ctccagtacctgaaagtgaaa

SEQ ID NO: 11277 - DNA, 21 bp, Homo sapiens
agggagttatttggtaagcaa

SEQ ID NO: 11278 - DNA, 21 bp, Homo sapiens
atccaagatcacatactttaa

SEQ ID NO: 11279 - DNA, 21 bp, Homo sapiens
caggcatatcatcaaggagta

SEQ ID NO: 11280 - DNA, 21 bp, Homo sapiens
tcgatttgcttcaggaattaa

SEQ ID NO: 11281 - DNA, 21 bp, Homo sapiens
ccggattcgagtcatcaagaa

SEQ ID NO: 11282 - DNA, 21 bp, Homo sapiens
ctggaggacggcgatctatat

SEQ ID NO: 11283 - DNA, 21 bp, Homo sapiens
caaccagagcatcgatcttaa

SEQ ID NO: 11284 - DNA, 21 bp, Homo sapiens
gagcatcgatcttaaccataa

SEQ ID NO: 11285 - DNA, 21 bp, Homo sapiens
aagactgttattgaaatagaa

SEQ ID NO: 11286 - DNA, 21 bp, Homo sapiens
gccggtttctttagttcttta

SEQ ID NO: 11287 - DNA, 21 bp, Homo sapiens
ctaatggaaattagaattcta

SEQ ID NO: 11288 - DNA, 21 bp, Homo sapiens
agggcagatgatggaaatcaa

SEQ ID NO: 11289 - DNA, 21 bp, Homo sapiens
tggctggaacttcctcaacta

SEQ ID NO: 11290 - DNA, 21 bp, Homo sapiens
cccactggtgaccttcgtgta

SEQ ID NO: 11291 - DNA, 21 bp, Homo sapiens
cacgttcaccaacattgccta

SEQ ID NO: 11292 - DNA, 21 bp, Homo sapiens
cagcttcatctcagagcctat

SEQ ID NO: 11293 - DNA, 21 bp, Homo sapiens
ccggttaagtgaactatgata

SEQ ID NO: 11294 - DNA, 21 bp, Homo sapiens
aaggatgggtatactccacta

SEQ ID NO: 11295 - DNA, 21 bp, Homo sapiens
caggctcttatgggcatgaaa

SEQ ID NO: 11296 - DNA, 21 bp, Homo sapiens
caacatcatcaccatatttaa

SEQ ID NO: 11297 - DNA, 21 bp, Homo sapiens
cgcgtgtgcctagaatatata

SEQ ID NO: 11298 - DNA, 21 bp, Homo sapiens
cagatgttaagcagctatgaa

SEQ ID NO: 11299 - DNA, 21 bp, Homo sapiens
cgggttgctgttgtcgatata

SEQ ID NO: 11300 - DNA, 21 bp, Homo sapiens
cagagtattaagagccgacaa

SEQ ID NO: 11301 - DNA, 21 bp, Homo sapiens
aagggcaaatcacatcagata

SEQ ID NO: 11302 - DNA, 21 bp, Homo sapiens
tccaaggtgcatcgacattaa

SEQ ID NO: 11303 - DNA, 21 bp, Homo sapiens
cacgttggacaattatgtcaa

SEQ ID NO: 11304 - DNA, 21 bp, Homo sapiens
acccattattgggaagcttaa

SEQ ID NO: 11305 - DNA, 21 bp, Homo sapiens
caggatcctgacagtgatcaa

SEQ ID NO: 11306 - DNA, 21 bp, Homo sapiens
caaggtgattctggataaata

SEQ ID NO: 11307 - DNA, 21 bp, Homo sapiens
caggatctggatgttgttgaa

SEQ ID NO: 11308 - DNA, 21 bp, Homo sapiens
ctggatgttgttgaaatcaca

SEQ ID NO: 11309 - DNA, 21 bp, Homo sapiens
accggaaagagtacaccttaa

SEQ ID NO: 11310 - DNA, 21 bp, Homo sapiens
acggtgtatcaccatacccaa

SEQ ID NO: 11311 - DNA, 21 bp, Homo sapiens
caggcacctaaggcatttcaa

SEQ ID NO: 11312 - DNA, 21 bp, Homo sapiens
caggatcgcagctcaagacta

SEQ ID NO: 11313 - DNA, 21 bp, Homo sapiens
taggataggctggagcataaa

SEQ ID NO: 11314 - DNA, 21 bp, Homo sapiens
ctggcaggctagtgtagataa

SEQ ID NO: 11315 - DNA, 21 bp, Homo sapiens
atccttattctttaagtctaa

SEQ ID NO: 11316 - DNA, 21 bp, Homo sapiens
ccaggcttccttcaaagcata

SEQ ID NO: 11317 - DNA, 21 bp, Homo sapiens
taactaaagaacatagcttaa

SEQ ID NO: 11318 - DNA, 21 bp, Homo sapiens
tgcaaagatgatgactattta

SEQ ID NO: 11319 - DNA, 21 bp, Homo sapiens
tgggaccatcctgttcttcaa

SEQ ID NO: 11320 - DNA, 21 bp, Homo sapiens
ctgcatttactcgctcttcaa

SEQ ID NO: 11321 - DNA, 21 bp, Homo sapiens
cgcgctgggcatcatgaacaa

SEQ ID NO: 11322 - DNA, 21 bp, Homo sapiens
ctggcgctttcttaatcttta

SEQ ID NO: 11323 - DNA, 21 bp, Homo sapiens
cagcattggcctggagtgcca

SEQ ID NO: 11324 - DNA, 21 bp, Homo sapiens
caggaggtcgccggctcccta

SEQ ID NO: 11325 - DNA, 21 bp, Homo sapiens
ctccatggaagaagccatcaa

SEQ ID NO: 11326 - DNA, 21 bp, Homo sapiens
ccctaatatttagggcaataa

SEQ ID NO: 11327 - DNA, 21 bp, Homo sapiens
cacgctttgccctcaccctta

SEQ ID NO: 11328 - DNA, 21 bp, Homo sapiens
caggtggagtatgggccgcta

SEQ ID NO: 11329 - DNA, 21 bp, Homo sapiens
ccgagggtagtgcctgatcaa

SEQ ID NO: 11330 - DNA, 21 bp, Homo sapiens
caggattgcgctcgctttcat

SEQ ID NO: 11331 - DNA, 21 bp, Homo sapiens
tacattatgtatattaattaa

SEQ ID NO: 11332 - DNA, 21 bp, Homo sapiens
caggtccaccttcttacttta

SEQ ID NO: 11333 - DNA, 21 bp, Homo sapiens
ctcctaatactccacattcaa

SEQ ID NO: 11334 - DNA, 21 bp, Homo sapiens
caagaacatgttacttctgaa

SEQ ID NO: 11335 - DNA, 21 bp, Homo sapiens
cacgtctttctgggcatataa

SEQ ID NO: 11336 - DNA, 21 bp, Homo sapiens
cagatgtacatagatgattta

SEQ ID NO: 11337 - DNA, 21 bp, Homo sapiens
cacatgctcaataaccctgaa

SEQ ID NO: 11338 - DNA, 21 bp, Homo sapiens
agagatgctaatggaatttaa

SEQ ID NO: 11339 - DNA, 21 bp, Homo sapiens
cacactggcctttgtaaataa

SEQ ID NO: 11340 - DNA, 21 bp, Homo sapiens
ccagaggaaattcgtgtgaaa

SEQ ID NO: 11341 - DNA, 21 bp, Homo sapiens
atgaattaatgttataaggaa

SEQ ID NO: 11342 - DNA, 21 bp, Homo sapiens
cgccatgttcatagaggataa

SEQ ID NO: 11343 - DNA, 21 bp, Homo sapiens
ctggaaattctatttacttta

SEQ ID NO: 11344 - DNA, 21 bp, Homo sapiens
aaggtaatttacagccagaaa

SEQ ID NO: 11345 - DNA, 21 bp, Homo sapiens
caccaagaactggacagagaa

SEQ ID NO: 11346 - DNA, 21 bp, Homo sapiens
cagacagagtttgaccggcaa

SEQ ID NO: 11347 - DNA, 21 bp, Homo sapiens
ctgagaattgttgtaaagtaa

SEQ ID NO: 11348 - DNA, 21 bp, Homo sapiens
aaggtgtggaataacccttaa

SEQ ID NO: 11349 - DNA, 21 bp, Homo sapiens
cccagcaaggataacattcaa

SEQ ID NO: 11350 - DNA, 21 bp, Homo sapiens
atggaatggatgaatcaataa

SEQ ID NO: 11351 - DNA, 21 bp, Homo sapiens
acggttcctcttagctattta

SEQ ID NO: 11352 - DNA, 21 bp, Homo sapiens
ctgggtgaaggttgatttgta

SEQ ID NO: 11353 - DNA, 21 bp, Homo sapiens
caacattgacttcttactcaa

SEQ ID NO: 11354 - DNA, 21 bp, Homo sapiens
tagcatgcagattgaagataa

SEQ ID NO: 11355 - DNA, 21 bp, Homo sapiens
catggttatgatcgccatgaa

SEQ ID NO: 11356 - DNA, 21 bp, Homo sapiens
atgcatttgggtcactaatta

SEQ ID NO: 11357 - DNA, 21 bp, Homo sapiens
cacggtgagggcggcgctgta

SEQ ID NO: 11358 - DNA, 21 bp, Homo sapiens
caggtttgacatccaggtaca

SEQ ID NO: 11359 - DNA, 21 bp, Homo sapiens
caccaacccagttctcagtta

SEQ ID NO: 11360 - DNA, 21 bp, Homo sapiens
ttgccacgtgtttcctgttaa

SEQ ID NO: 11361 - DNA, 21 bp, Homo sapiens
aaaggagataatagccttaaa

SEQ ID NO: 11362 - DNA, 21 bp, Homo sapiens
ctggtctttgacttgattaaa

SEQ ID NO: 11363 - DNA, 21 bp, Homo sapiens
cgcggtgatggtggttagcaa

SEQ ID NO: 11364 - DNA, 21 bp, Homo sapiens
aaggagctcctacaaagaata

SEQ ID NO: 11365 - DNA, 21 bp, Homo sapiens
ccggaccttgtcttcgaggaa

SEQ ID NO: 11366 - DNA, 21 bp, Homo sapiens
cagctacgtttgtacatcaaa

SEQ ID NO: 11367 - DNA, 21 bp, Homo sapiens
ccgcgtgtacaagtcactgaa

SEQ ID NO: 11368 - DNA, 21 bp, Homo sapiens
cacgtacaacacgcaggtcaa

SEQ ID NO: 11369 - DNA, 21 bp, Homo sapiens
aagatagaaatgaccggttaa

SEQ ID NO: 11370 - DNA, 21 bp, Homo sapiens
accggttaagagattcttatt

SEQ ID NO: 11371 - DNA, 21 bp, Homo sapiens
ccggagggccaagcactataa

SEQ ID NO: 11372 - DNA, 21 bp, Homo sapiens
gaggttagtctgaatcttgaa

SEQ ID NO: 11373 - DNA, 21 bp, Homo sapiens
aaggatatttgtgtacaatta

SEQ ID NO: 11374 - DNA, 21 bp, Homo sapiens
taggataatgatattgctcaa

SEQ ID NO: 11375 - DNA, 21 bp, Homo sapiens
cagggtatgacttgaatttat

SEQ ID NO: 11376 - DNA, 21 bp, Homo sapiens
taccgggaatgcagctattaa

SEQ ID NO: 11377 - DNA, 21 bp, Homo sapiens
ccgggaatgcagctattaata

SEQ ID NO: 11378 - DNA, 21 bp, Homo sapiens
ctcgaaactaagcaagtataa

SEQ ID NO: 11379 - DNA, 21 bp, Homo sapiens
ccggcactgcgaccactttaa

SEQ ID NO: 11380 - DNA, 21 bp, Homo sapiens
caaagtgtatttggatttaaa

SEQ ID NO: 11381 - DNA, 21 bp, Homo sapiens
aaccagataattaattagtta

SEQ ID NO: 11382 - DNA, 21 bp, Homo sapiens
ccgggcgtgtgtatatggaaa

SEQ ID NO: 11383 - DNA, 21 bp, Homo sapiens
ccagggcttcctgcatctgaa

SEQ ID NO: 11384 - DNA, 21 bp, Homo sapiens
tccggagacctccgcccagaa

SEQ ID NO: 11385 - DNA, 21 bp, Homo sapiens
cgccataaattctgaaataaa

SEQ ID NO: 11386 - DNA, 21 bp, Homo sapiens
cagcatgaaagtgatgagcta

SEQ ID NO: 11387 - DNA, 21 bp, Homo sapiens
cagcatctatgatgacatcaa

SEQ ID NO: 11388 - DNA, 21 bp, Homo sapiens
ccacaagagtttacaaatgaa

SEQ ID NO: 11389 - DNA, 21 bp, Homo sapiens
cgggtcgatgtgcaaatccaa

SEQ ID NO: 11390 - DNA, 21 bp, Homo sapiens
ccgcattaatgtcctctggaa

SEQ ID NO: 11391 - DNA, 21 bp, Homo sapiens
ctggctgattgtggacaagaa

SEQ ID NO: 11392 - DNA, 21 bp, Homo sapiens
ctggatgaggtacgtggtcat

SEQ ID NO: 11393 - DNA, 21 bp, Homo sapiens
caggttctggataacccagaa

SEQ ID NO: 11394 - DNA, 21 bp, Homo sapiens
acgcctacagtcagtgtgcaa

SEQ ID NO: 11395 - DNA, 21 bp, Homo sapiens
aagagcaataatacaattcaa

SEQ ID NO: 11396 - DNA, 21 bp, Homo sapiens
atcaaatttctttatctataa

SEQ ID NO: 11397 - DNA, 21 bp, Homo sapiens
acggcggattgacagaagtat

SEQ ID NO: 11398 - DNA, 21 bp, Homo sapiens
cccacaaactttgtgcataca

SEQ ID NO: 11399 - DNA, 21 bp, Homo sapiens
caggagacctgttcagtggaa

SEQ ID NO: 11400 - DNA, 21 bp, Homo sapiens
aagggaggttatggaggtgga

SEQ ID NO: 11401 - DNA, 21 bp, Homo sapiens
ctctatacactcagaattcta

SEQ ID NO: 11402 - DNA, 21 bp, Homo sapiens
caggattcctatgacaactta

SEQ ID NO: 11403 - DNA, 21 bp, Homo sapiens
ttgagattgaccaactttcaa

SEQ ID NO: 11404 - DNA, 21 bp, Homo sapiens
acgcaataacaaattatcatt

SEQ ID NO: 11405 - DNA, 21 bp, Homo sapiens
ccgtttcttgatcaccactta

SEQ ID NO: 11406 - DNA, 21 bp, Homo sapiens
ctcggtgcagtaatctataaa

SEQ ID NO: 11407 - DNA, 21 bp, Homo sapiens
cacactgtgttggaccaacaa

SEQ ID NO: 11408 - DNA, 21 bp, Homo sapiens
atgcattactgtaaacatgat

SEQ ID NO: 11409 - DNA, 21 bp, Homo sapiens
cagcagtaccctgaaggacaa

SEQ ID NO: 11410 - DNA, 21 bp, Homo sapiens
cacgatcgtcgccgtcgccta

SEQ ID NO: 11411 - DNA, 21 bp, Homo sapiens
cccactggtgttgatcggaat

SEQ ID NO: 11412 - DNA, 21 bp, Homo sapiens
ctggtgttgatcggaatctat

SEQ ID NO: 11413 - DNA, 21 bp, Homo sapiens
tcccttcagactggcccttaa

SEQ ID NO: 11414 - DNA, 21 bp, Homo sapiens
cagtatcgtttgtttatgaaa

SEQ ID NO: 11415 - DNA, 21 bp, Homo sapiens
tgcgtttataattggcttaaa

SEQ ID NO: 11416 - DNA, 21 bp, Homo sapiens
cacctgtttgcctgaagttaa

SEQ ID NO: 11417 - DNA, 21 bp, Homo sapiens
cacgctctccttcatttacat

SEQ ID NO: 11418 - DNA, 21 bp, Homo sapiens
ctgggtgaatatccaggccaa

SEQ ID NO: 11419 - DNA, 21 bp, Homo sapiens
ccggaagatcatcttctccta

SEQ ID NO: 11420 - DNA, 21 bp, Homo sapiens
cactattggtgtaccttataa

SEQ ID NO: 11421 - DNA, 21 bp, Homo sapiens
ttggatataagggatcttgta

SEQ ID NO: 11422 - DNA, 21 bp, Homo sapiens
cagtgtgatgtatggactcaa

SEQ ID NO: 11423 - DNA, 21 bp, Homo sapiens
ctccaagaagacactataata

SEQ ID NO: 11424 - DNA, 21 bp, Homo sapiens
ccctagcagtatctaattaaa

SEQ ID NO: 11425 - DNA, 21 bp, Homo sapiens
caggttgaacatgatgatcaa

SEQ ID NO: 11426 - DNA, 21 bp, Homo sapiens
caaagtgaagacagcatctaa

SEQ ID NO: 11427 - DNA, 21 bp, Homo sapiens
caggtttcagtcagtaaataa

SEQ ID NO: 11428 - DNA, 21 bp, Homo sapiens
ccagtttaggttcctaagtaa

SEQ ID NO: 11429 - DNA, 21 bp, Homo sapiens
tagcatctgcttggccaatta

SEQ ID NO: 11430 - DNA, 21 bp, Homo sapiens
tacattcatataaactttgta

SEQ ID NO: 11431 - DNA, 21 bp, Homo sapiens
aagggcgagactgtaaagcga

SEQ ID NO: 11432 - DNA, 21 bp, Homo sapiens
acaggagttcttggttcccaa

SEQ ID NO: 11433 - DNA, 21 bp, Homo sapiens
ttgggtcttctcaggaccgta

SEQ ID NO: 11434 - DNA, 21 bp, Homo sapiens
aacctgaaggtgattctccta

SEQ ID NO: 11435 - DNA, 21 bp, Homo sapiens
ctgcttcgtctaccacatgta

SEQ ID NO: 11436 - DNA, 21 bp, Homo sapiens
cagggattgcctgaaccaaga

SEQ ID NO: 11437 - DNA, 21 bp, Homo sapiens
caggatctcacatttgcttaa

SEQ ID NO: 11438 - DNA, 21 bp, Homo sapiens
tacgtattggttctttattaa

SEQ ID NO: 11439 - DNA, 21 bp, Homo sapiens
caggccttgtttctacctcaa

SEQ ID NO: 11440 - DNA, 21 bp, Homo sapiens
atgatatctttctgtatgaaa

SEQ ID NO: 11441 - DNA, 21 bp, Homo sapiens
cagattatgccaggcacttta

SEQ ID NO: 11442 - DNA, 21 bp, Homo sapiens
aagggtggaggtgatatggca

SEQ ID NO: 11443 - DNA, 21 bp, Homo sapiens
tgggatcatatggatccttat

SEQ ID NO: 11444 - DNA, 21 bp, Homo sapiens
caggctttctaaattcttcaa

SEQ ID NO: 11445 - DNA, 21 bp, Homo sapiens
aacggtgatgtgaacttccaa

SEQ ID NO: 11446 - DNA, 21 bp, Homo sapiens
ccggatcaaactcgccattaa

SEQ ID NO: 11447 - DNA, 21 bp, Homo sapiens
cggatcaaactcgccattaaa

SEQ ID NO: 11448 - DNA, 21 bp, Homo sapiens
caggcttacgtcaacagtcta

SEQ ID NO: 11449 - DNA, 21 bp, Homo sapiens
ccagtgaatgtccttgttata

SEQ ID NO: 11450 - DNA, 21 bp, Homo sapiens
caggatgactctcccagcgaa

SEQ ID NO: 11451 - DNA, 21 bp, Homo sapiens
cagcgaagtatggcatcatta

SEQ ID NO: 11452 - DNA, 21 bp, Homo sapiens
tcagcagtgtctgaaatttaa

SEQ ID NO: 11453 - DNA, 21 bp, Homo sapiens
ccaagttgtactgaacgccaa

SEQ ID NO: 11454 - DNA, 21 bp, Homo sapiens
aacctgctacttcgtcagcta

SEQ ID NO: 11455 - DNA, 21 bp, Homo sapiens
tacgcccactgtacctttaaa

SEQ ID NO: 11456 - DNA, 21 bp, Homo sapiens
caggacctagtggaagtacta

SEQ ID NO: 11457 - DNA, 21 bp, Homo sapiens
ctgagaaagattaagcatgaa

SEQ ID NO: 11458 - DNA, 21 bp, Homo sapiens
atggagaaggacccgaataaa

SEQ ID NO: 11459 - DNA, 21 bp, Homo sapiens
ccaggcgctttctatacttaa

SEQ ID NO: 11460 - DNA, 21 bp, Homo sapiens
caggcgctttctatacttaat

SEQ ID NO: 11461 - DNA, 21 bp, Homo sapiens
cagctttaagtgggaatctta

SEQ ID NO: 11462 - DNA, 21 bp, Homo sapiens
caggtgaatatactgagtaaa

SEQ ID NO: 11463 - DNA, 21 bp, Homo sapiens
caagcgcatcactgactgcta

SEQ ID NO: 11464 - DNA, 21 bp, Homo sapiens
ccagcagatgtgtgtcaacta

SEQ ID NO: 11465 - DNA, 21 bp, Homo sapiens
ccctatgatctcaaccaaata

SEQ ID NO: 11466 - DNA, 21 bp, Homo sapiens
cacgctggctgtcgacggcta

SEQ ID NO: 11467 - DNA, 21 bp, Homo sapiens
caggagctgcacttcattgaa

SEQ ID NO: 11468 - DNA, 21 bp, Homo sapiens
caccttcgccatcaattacaa

SEQ ID NO: 11469 - DNA, 21 bp, Homo sapiens
cacctactctgccgtcgtcaa

SEQ ID NO: 11470 - DNA, 21 bp, Homo sapiens
cctgatgaacctgttcaccta

SEQ ID NO: 11471 - DNA, 21 bp, Homo sapiens
ccgagcctatgtggagaagta

SEQ ID NO: 11472 - DNA, 21 bp, Homo sapiens
ccgggcagggctggaattcga

SEQ ID NO: 11473 - DNA, 21 bp, Homo sapiens
acgcctctagtagcaaaccat

SEQ ID NO: 11474 - DNA, 21 bp, Homo sapiens
aaggtggattacgatcgagca

SEQ ID NO: 11475 - DNA, 21 bp, Homo sapiens
atggtgtgcacgtttcattaa

SEQ ID NO: 11476 - DNA, 21 bp, Homo sapiens
atgatctggatccgtattata

SEQ ID NO: 11477 - DNA, 21 bp, Homo sapiens
aaggtgtagtttccactgtaa

SEQ ID NO: 11478 - DNA, 21 bp, Homo sapiens
cagatggatgaagaccactaa

SEQ ID NO: 11479 - DNA, 21 bp, Homo sapiens
tgaggagtattcagtcaataa

SEQ ID NO: 11480 - DNA, 21 bp, Homo sapiens
caggaggtggaatcactgcta

SEQ ID NO: 11481 - DNA, 21 bp, Homo sapiens
caggacaattccggaagtaaa

SEQ ID NO: 11482 - DNA, 21 bp, Homo sapiens
aagctctattatgaaatacaa

SEQ ID NO: 11483 - DNA, 21 bp, Homo sapiens
ccggtactttgtcttggataa

SEQ ID NO: 11484 - DNA, 21 bp, Homo sapiens
ccgggctgttactgtgaataa

SEQ ID NO: 11485 - DNA, 21 bp, Homo sapiens
aagcaagttcaacatatcaaa

SEQ ID NO: 11486 - DNA, 21 bp, Homo sapiens
cagcagctttcttgccctaaa

SEQ ID NO: 11487 - DNA, 21 bp, Homo sapiens
ctgcttccgagacctctgcaa

SEQ ID NO: 11488 - DNA, 21 bp, Homo sapiens
cagctcctgtgtggccaccga

SEQ ID NO: 11489 - DNA, 21 bp, Homo sapiens
cagggcggaaggtgctcctca

SEQ ID NO: 11490 - DNA, 21 bp, Homo sapiens
caggaccattacccgctgcaa

SEQ ID NO: 11491 - DNA, 21 bp, Homo sapiens
ccgggactttgagtactataa

SEQ ID NO: 11492 - DNA, 21 bp, Homo sapiens
cacagtgaacacccacgttta

SEQ ID NO: 11493 - DNA, 21 bp, Homo sapiens
cagaactgtttggttgattaa

SEQ ID NO: 11494 - DNA, 21 bp, Homo sapiens
cagggttagggtttaaagaaa

SEQ ID NO: 11495 - DNA, 21 bp, Homo sapiens
cacgtgatataactggttata

SEQ ID NO: 11496 - DNA, 21 bp, Homo sapiens
ctcgggtacaatggtgcttta

SEQ ID NO: 11497 - DNA, 21 bp, Homo sapiens
caggactacattataaattta

SEQ ID NO: 11498 - DNA, 21 bp, Homo sapiens
caggctatatattgtagctta

SEQ ID NO: 11499 - DNA, 21 bp, Homo sapiens
ccgaaccaacacatccattaa

SEQ ID NO: 11500 - DNA, 21 bp, Homo sapiens
cgcggtggatgtcaaacccaa

SEQ ID NO: 11501 - DNA, 21 bp, Homo sapiens
ctggaagaaacagaccaccaa

SEQ ID NO: 11502 - DNA, 21 bp, Homo sapiens
tagaaagaagttcatgagtaa

SEQ ID NO: 11503 - DNA, 21 bp, Homo sapiens
caggtcttgtcggcagtgaaa

SEQ ID NO: 11504 - DNA, 21 bp, Homo sapiens
aacaggccgcctgaaactcaa

SEQ ID NO: 11505 - DNA, 21 bp, Homo sapiens
ccggaggaaccgtgaagccaa

SEQ ID NO: 11506 - DNA, 21 bp, Homo sapiens
tagtattgtatgaaatcccta

SEQ ID NO: 11507 - DNA, 21 bp, Homo sapiens
catgcaggaattgctacacaa

SEQ ID NO: 11508 - DNA, 21 bp, Homo sapiens
cgctttatcctcaatgcttta

SEQ ID NO: 11509 - DNA, 21 bp, Homo sapiens
ctgtgttataatgatacttaa

SEQ ID NO: 11510 - DNA, 21 bp, Homo sapiens
tagcaattgaataaacataaa

SEQ ID NO: 11511 - DNA, 21 bp, Homo sapiens
ctggaaggaagtggacgtcaa

SEQ ID NO: 11512 - DNA, 21 bp, Homo sapiens
caggcgtgattatgaaacaaa

SEQ ID NO: 11513 - DNA, 21 bp, Homo sapiens
tagagagaccctcgtccttta

SEQ ID NO: 11514 - DNA, 21 bp, Homo sapiens
atcctagaagacagtatgata

SEQ ID NO: 11515 - DNA, 21 bp, Homo sapiens
cagagttgaggtttgcatata

SEQ ID NO: 11516 - DNA, 21 bp, Homo sapiens
ccagggattactccaactgaa

SEQ ID NO: 11517 - DNA, 21 bp, Homo sapiens
cgggactaagagatacctaca

SEQ ID NO: 11518 - DNA, 21 bp, Homo sapiens
acggtttataattaacataca

SEQ ID NO: 11519 - DNA, 21 bp, Homo sapiens
ctcgtcatttcattaggtata

SEQ ID NO: 11520 - DNA, 21 bp, Homo sapiens
ccacggtttataattaacata

SEQ ID NO: 11521 - DNA, 21 bp, Homo sapiens
caccttcatcgtgaccaatta

SEQ ID NO: 11522 - DNA, 21 bp, Homo sapiens
aggcaccaacatctgaataaa

SEQ ID NO: 11523 - DNA, 21 bp, Homo sapiens
cagaggagctatgatagacca

SEQ ID NO: 11524 - DNA, 21 bp, Homo sapiens
tgggaaagacctatcaggcaa

SEQ ID NO: 11525 - DNA, 21 bp, Homo sapiens
ctcgcgtgtcctgactccaaa

SEQ ID NO: 11526 - DNA, 21 bp, Homo sapiens
cacggcttctgccatctgcaa

SEQ ID NO: 11527 - DNA, 21 bp, Homo sapiens
aaggatccacatacccataga

SEQ ID NO: 11528 - DNA, 21 bp, Homo sapiens
agcagctaggcgcgagcgaaa

SEQ ID NO: 11529 - DNA, 21 bp, Homo sapiens
cgcggccgccatcaaagtcaa

SEQ ID NO: 11530 - DNA, 21 bp, Homo sapiens
aggactctcgtaggaaataaa

SEQ ID NO: 11531 - DNA, 21 bp, Homo sapiens
caggccagacttcgtgcctta

SEQ ID NO: 11532 - DNA, 21 bp, Homo sapiens
cacctctataccacccattaa

SEQ ID NO: 11533 - DNA, 21 bp, Homo sapiens
ccaggatatattgaaccttta

SEQ ID NO: 11534 - DNA, 21 bp, Homo sapiens
cagaggcaacttattcatgaa

SEQ ID NO: 11535 - DNA, 21 bp, Homo sapiens
tccagaggtttcgatatgcaa

SEQ ID NO: 11536 - DNA, 21 bp, Homo sapiens
aacccggaacttgcagaaata

SEQ ID NO: 11537 - DNA, 21 bp, Homo sapiens
ccggaacgcgttcctgcagaa

SEQ ID NO: 11538 - DNA, 21 bp, Homo sapiens
cagaaggactgttgccttgta

SEQ ID NO: 11539 - DNA, 21 bp, Homo sapiens
aagaaggatagaagaactcaa

SEQ ID NO: 11540 - DNA, 21 bp, Homo sapiens
acggccgtttgttgctattaa

SEQ ID NO: 11541 - DNA, 21 bp, Homo sapiens
caggtaaaccctaatcattaa

SEQ ID NO: 11542 - DNA, 21 bp, Homo sapiens
atgagtgttagtggaatttaa

SEQ ID NO: 11543 - DNA, 21 bp, Homo sapiens
atggtacaggctactgctaaa

SEQ ID NO: 11544 - DNA, 21 bp, Homo sapiens
cacggtttgctgtgtttcaaa

SEQ ID NO: 11545 - DNA, 21 bp, Homo sapiens
ccagatgtttcgaacactaaa

SEQ ID NO: 11546 - DNA, 21 bp, Homo sapiens
ctgtctcgaattgtagtggaa

SEQ ID NO: 11547 - DNA, 21 bp, Homo sapiens
caggatgtcaccatagataaa

SEQ ID NO: 11548 - DNA, 21 bp, Homo sapiens
ctggatcagactccaaatcaa

SEQ ID NO: 11549 - DNA, 21 bp, Homo sapiens
ctccatcacttgagaagtata

SEQ ID NO: 11550 - DNA, 21 bp, Homo sapiens
acggtctactatcatcagtaa

SEQ ID NO: 11551 - DNA, 21 bp, Homo sapiens
aaggctcttctcagaattcta

SEQ ID NO: 11552 - DNA, 21 bp, Homo sapiens
caggattggtgcgcctttcaa

SEQ ID NO: 11553 - DNA, 21 bp, Homo sapiens
caccatctcactacattctta

SEQ ID NO: 11554 - DNA, 21 bp, Homo sapiens
aagcaatatcctcactgataa

SEQ ID NO: 11555 - DNA, 21 bp, Homo sapiens
cagggcatatatgactcccta

SEQ ID NO: 11556 - DNA, 21 bp, Homo sapiens
aaggcccataccaacaagtaa

SEQ ID NO: 11557 - DNA, 21 bp, Homo sapiens
cagcaggactgtgttcatgaa

SEQ ID NO: 11558 - DNA, 21 bp, Homo sapiens
aacactggagttggccttaaa

SEQ ID NO: 11559 - DNA, 21 bp, Homo sapiens
caggtggatgctgggacacaa

SEQ ID NO: 11560 - DNA, 21 bp, Homo sapiens
caggcagatgggaagatacaa

SEQ ID NO: 11561 - DNA, 21 bp, Homo sapiens
gtggatcattgcactgctgaa

SEQ ID NO: 11562 - DNA, 21 bp, Homo sapiens
atcgaggtttcgctcaccaaa

SEQ ID NO: 11563 - DNA, 21 bp, Homo sapiens
cccttctaacttctaaccgaa

SEQ ID NO: 11564 - DNA, 21 bp, Homo sapiens
acccatgttcataaataaata

SEQ ID NO: 11565 - DNA, 21 bp, Homo sapiens
aaggaatgaaattctgataaa

SEQ ID NO: 11566 - DNA, 21 bp, Homo sapiens
cccaaagttattaccacataa

SEQ ID NO: 11567 - DNA, 21 bp, Homo sapiens
ccaaatttaatccataataaa

SEQ ID NO: 11568 - DNA, 21 bp, Homo sapiens
aagcatttatgagaattataa

SEQ ID NO: 11569 - DNA, 21 bp, Homo sapiens
cacggtgaagatgaaggaaca

SEQ ID NO: 11570 - DNA, 21 bp, Homo sapiens
aagaccaaggatgaaatggaa

SEQ ID NO: 11571 - DNA, 21 bp, Homo sapiens
cagcaattacattaaattcaa

SEQ ID NO: 11572 - DNA, 21 bp, Homo sapiens
aaggtgctgaatagcattaaa

SEQ ID NO: 11573 - DNA, 21 bp, Homo sapiens
ctggctctttccaaactagaa

SEQ ID NO: 11574 - DNA, 21 bp, Homo sapiens
agcgctggaaacttctattaa

SEQ ID NO: 11575 - DNA, 21 bp, Homo sapiens
caggtcatcgtggccataata

SEQ ID NO: 11576 - DNA, 21 bp, Homo sapiens
acgaggacgtagcaaatttaa

SEQ ID NO: 11577 - DNA, 21 bp, Homo sapiens
ctgcataatgatcccatttca

SEQ ID NO: 11578 - DNA, 21 bp, Homo sapiens
cagatcgtcagtgggattgaa

SEQ ID NO: 11579 - DNA, 21 bp, Homo sapiens
cccgacaaccttgccacccaa

SEQ ID NO: 11580 - DNA, 21 bp, Homo sapiens
aagggccaccactgtacgtta

SEQ ID NO: 11581 - DNA, 21 bp, Homo sapiens
ccgcctggtcttcttcaacaa

SEQ ID NO: 11582 - DNA, 21 bp, Homo sapiens
caggctctcaggaatccttta

SEQ ID NO: 11583 - DNA, 21 bp, Homo sapiens
cagggagaagtgacctggaaa

SEQ ID NO: 11584 - DNA, 21 bp, Homo sapiens
caagttcttcctcaaatgcaa

SEQ ID NO: 11585 - DNA, 21 bp, Homo sapiens
caagtttgtcatataaagtaa

SEQ ID NO: 11586 - DNA, 21 bp, Homo sapiens
aagggagatcatagtgagtta

SEQ ID NO: 11587 - DNA, 21 bp, Homo sapiens
ctccaagatgattataaagga

SEQ ID NO: 11588 - DNA, 21 bp, Homo sapiens
ctcgtgcaagcaggagagaaa

SEQ ID NO: 11589 - DNA, 21 bp, Homo sapiens
ctcgagtttctcaactgttca

SEQ ID NO: 11590 - DNA, 21 bp, Homo sapiens
acgggaaggcttggactccaa

SEQ ID NO: 11591 - DNA, 21 bp, Homo sapiens
ctggaagtaactttacttata

SEQ ID NO: 11592 - DNA, 21 bp, Homo sapiens
aaggtaaataatagcctataa

SEQ ID NO: 11593 - DNA, 21 bp, Homo sapiens
ccggcatacattgagtataaa

SEQ ID NO: 11594 - DNA, 21 bp, Homo sapiens
atggaattaatttacacgtaa

SEQ ID NO: 11595 - DNA, 21 bp, Homo sapiens
gtgaatctcttaagtatttaa

SEQ ID NO: 11596 - DNA, 21 bp, Homo sapiens
cggcgcagtgatggatgttaa

SEQ ID NO: 11597 - DNA, 21 bp, Homo sapiens
catggtgtatttgcaaactaa

SEQ ID NO: 11598 - DNA, 21 bp, Homo sapiens
ttggtttagtatagaatttga

SEQ ID NO: 11599 - DNA, 21 bp, Homo sapiens
cccgattatctcgctgcataa

SEQ ID NO: 11600 - DNA, 21 bp, Homo sapiens
atggaggtggagagcattaaa

SEQ ID NO: 11601 - DNA, 21 bp, Homo sapiens
aacgtttaattaaatgagtaa

SEQ ID NO: 11602 - DNA, 21 bp, Homo sapiens
caggagtacctttcacatcta

SEQ ID NO: 11603 - DNA, 21 bp, Homo sapiens
aagattgataaccctcacata

SEQ ID NO: 11604 - DNA, 21 bp, Homo sapiens
aacctcttcaatcccactaaa

SEQ ID NO: 11605 - DNA, 21 bp, Homo sapiens
ctggtttgattctacacccaa

SEQ ID NO: 11606 - DNA, 21 bp, Homo sapiens
aagactttgcttgaatgttta

SEQ ID NO: 11607 - DNA, 21 bp, Homo sapiens
ctccttcatctcggccgtcaa

SEQ ID NO: 11608 - DNA, 21 bp, Homo sapiens
ctggctgaaagcagcactgaa

SEQ ID NO: 11609 - DNA, 21 bp, Homo sapiens
cccgaccttcacgctcttcaa

SEQ ID NO: 11610 - DNA, 21 bp, Homo sapiens
ctgggaagagagcaagttcaa

SEQ ID NO: 11611 - DNA, 21 bp, Homo sapiens
ctggaacagtttgcagataaa

SEQ ID NO: 11612 - DNA, 21 bp, Homo sapiens
aaggattaggtgggcacataa

SEQ ID NO: 11613 - DNA, 21 bp, Homo sapiens
cccagtgactgtgcatttcaa

SEQ ID NO: 11614 - DNA, 21 bp, Homo sapiens
ccagatcaacttggatcatta

SEQ ID NO: 11615 - DNA, 21 bp, Homo sapiens
accactcttatagaacaacaa

SEQ ID NO: 11616 - DNA, 21 bp, Homo sapiens
cagctagtagacagagaacat

SEQ ID NO: 11617 - DNA, 21 bp, Homo sapiens
cggcacaatctttctgttcaa

SEQ ID NO: 11618 - DNA, 21 bp, Homo sapiens
cagaaagagcgcagagtgata

SEQ ID NO: 11619 - DNA, 21 bp, Homo sapiens
cacggtgatctcgaactccta

SEQ ID NO: 11620 - DNA, 21 bp, Homo sapiens
atccaagatcacagagattta

SEQ ID NO: 11621 - DNA, 21 bp, Homo sapiens
ctgagtgggaacatacttcta

SEQ ID NO: 11622 - DNA, 21 bp, Homo sapiens
agggacaagagtagtccttta

SEQ ID NO: 11623 - DNA, 21 bp, Homo sapiens
cagctttctgccaacatgtaa

SEQ ID NO: 11624 - DNA, 21 bp, Homo sapiens
cccgccttggatcgtcttcaa

SEQ ID NO: 11625 - DNA, 21 bp, Homo sapiens
cacacgaaccatctccatcaa

SEQ ID NO: 11626 - DNA, 21 bp, Homo sapiens
cgagctcaatttggtggtaaa

SEQ ID NO: 11627 - DNA, 21 bp, Homo sapiens
cgcgtccttgataaatctcta

SEQ ID NO: 11628 - DNA, 21 bp, Homo sapiens
ccggatcaatattcctggaaa

SEQ ID NO: 11629 - DNA, 21 bp, Homo sapiens
tatagtaagtataatgaataa

SEQ ID NO: 11630 - DNA, 21 bp, Homo sapiens
acaagtcttacttggaataaa

SEQ ID NO: 11631 - DNA, 21 bp, Homo sapiens
ctgcctggtgtgtgcacacaa

SEQ ID NO: 11632 - DNA, 21 bp, Homo sapiens
caagcatggatgacatattaa

SEQ ID NO: 11633 - DNA, 21 bp, Homo sapiens
ccgaagttacagattatatta

SEQ ID NO: 11634 - DNA, 21 bp, Homo sapiens
tagtctgttgatataaatata

SEQ ID NO: 11635 - DNA, 21 bp, Homo sapiens
ccgctggaagtccaactttaa

SEQ ID NO: 11636 - DNA, 21 bp, Homo sapiens
cagcttggcatttaatgtcaa

SEQ ID NO: 11637 - DNA, 21 bp, Homo sapiens
caggaacagattacagataaa

SEQ ID NO: 11638 - DNA, 21 bp, Homo sapiens
cagcaaacaaatgataggaaa

SEQ ID NO: 11639 - DNA, 21 bp, Homo sapiens
caggcagtgcacttagagaaa

SEQ ID NO: 11640 - DNA, 21 bp, Homo sapiens
cgcgttgcaaactattataaa

SEQ ID NO: 11641 - DNA, 21 bp, Homo sapiens
atggatttaataggtaatcaa

SEQ ID NO: 11642 - DNA, 21 bp, Homo sapiens
aaccttgtatacagacattaa

SEQ ID NO: 11643 - DNA, 21 bp, Homo sapiens
caggctacttcgaaccaggaa

SEQ ID NO: 11644 - DNA, 21 bp, Homo sapiens
cccgctgctcctgaagttgta

SEQ ID NO: 11645 - DNA, 21 bp, Homo sapiens
agggatggaatttggcttcaa

SEQ ID NO: 11646 - DNA, 21 bp, Homo sapiens
cccgccgtggaaattgaggaa

SEQ ID NO: 11647 - DNA, 21 bp, Homo sapiens
acagcattaaacagtcaataa

SEQ ID NO: 11648 - DNA, 21 bp, Homo sapiens
aacctgatttatagtcctgta

SEQ ID NO: 11649 - DNA, 21 bp, Homo sapiens
aagcaagagctgaatataata

SEQ ID NO: 11650 - DNA, 21 bp, Homo sapiens
aacgggtacggtgataattaa

SEQ ID NO: 11651 - DNA, 21 bp, Homo sapiens
ccggctcaagaagaaagtgaa

SEQ ID NO: 11652 - DNA, 21 bp, Homo sapiens
ccagcctatgataacactaaa

SEQ ID NO: 11653 - DNA, 21 bp, Homo sapiens
tcggaagcactgctcagtgaa

SEQ ID NO: 11654 - DNA, 21 bp, Homo sapiens
cacacagaggacctacacata

SEQ ID NO: 11655 - DNA, 21 bp, Homo sapiens
cacaaagaccttcgcattcca

SEQ ID NO: 11656 - DNA, 21 bp, Homo sapiens
ccgcacggcatgtgtcagcaa

SEQ ID NO: 11657 - DNA, 21 bp, Homo sapiens
aaccatgatttgcaactgtaa

SEQ ID NO: 11658 - DNA, 21 bp, Homo sapiens
cagatagacctggaaacataa

SEQ ID NO: 11659 - DNA, 21 bp, Homo sapiens
caggacaagtgtaacctttaa

SEQ ID NO: 11660 - DNA, 21 bp, Homo sapiens
caggaactcattgaagacata

SEQ ID NO: 11661 - DNA, 21 bp, Homo sapiens
cacagtgtgattgtttacaaa

SEQ ID NO: 11662 - DNA, 21 bp, Homo sapiens
ctcgatttgtgaagtccttaa

SEQ ID NO: 11663 - DNA, 21 bp, Homo sapiens
taggagttagttaggcattga

SEQ ID NO: 11664 - DNA, 21 bp, Homo sapiens
cagtagggccttgaaggttat

SEQ ID NO: 11665 - DNA, 21 bp, Homo sapiens
ctgcagcctgttgcccaataa

SEQ ID NO: 11666 - DNA, 21 bp, Homo sapiens
ccgcatcatgaagggcctaaa

SEQ ID NO: 11667 - DNA, 21 bp, Homo sapiens
ccgccactcgaagctggagaa

SEQ ID NO: 11668 - DNA, 21 bp, Homo sapiens
tgccgagactgtagcagagaa

SEQ ID NO: 11669 - DNA, 21 bp, Homo sapiens
ctccaagccggtcatggagaa

SEQ ID NO: 11670 - DNA, 21 bp, Homo sapiens
aaacgtatttattattccaaa

SEQ ID NO: 11671 - DNA, 21 bp, Homo sapiens
ttcactaatgcttatcaataa

SEQ ID NO: 11672 - DNA, 21 bp, Homo sapiens
gaggctcaactcctccatcta

SEQ ID NO: 11673 - DNA, 21 bp, Homo sapiens
ccacttaacaactaaatacaa

SEQ ID NO: 11674 - DNA, 21 bp, Homo sapiens
ccggttccacttaacaactaa

SEQ ID NO: 11675 - DNA, 21 bp, Homo sapiens
aagataatttagctaacttta

SEQ ID NO: 11676 - DNA, 21 bp, Homo sapiens
tagcagggccttcaaagtaaa

SEQ ID NO: 11677 - DNA, 21 bp, Homo sapiens
atgtattaattggctctataa

SEQ ID NO: 11678 - DNA, 21 bp, Homo sapiens
caccatgggtctgcagagcaa

SEQ ID NO: 11679 - DNA, 21 bp, Homo sapiens
aacagatattgtgagattcaa

SEQ ID NO: 11680 - DNA, 21 bp, Homo sapiens
cactaatagaacaatcctaaa

SEQ ID NO: 11681 - DNA, 21 bp, Homo sapiens
aaggaagaggaggtacattaa

SEQ ID NO: 11682 - DNA, 21 bp, Homo sapiens
caccttgtacaacaagatcta

SEQ ID NO: 11683 - DNA, 21 bp, Homo sapiens
ccggatgtgctgaggcctaaa

SEQ ID NO: 11684 - DNA, 21 bp, Homo sapiens
ctcaaatgttcccaagataaa

SEQ ID NO: 11685 - DNA, 21 bp, Homo sapiens
cagctccttcaagccagtgaa

SEQ ID NO: 11686 - DNA, 21 bp, Homo sapiens
ctccttcaagccagtgaacaa

SEQ ID NO: 11687 - DNA, 21 bp, Homo sapiens
tcggagtactattatccaata

SEQ ID NO: 11688 - DNA, 21 bp, Homo sapiens
caggaaggatttgactatcat

SEQ ID NO: 11689 - DNA, 21 bp, Homo sapiens
cacactcatattgcttaaata

SEQ ID NO: 11690 - DNA, 21 bp, Homo sapiens
cacggtcttggatataagtaa

SEQ ID NO: 11691 - DNA, 21 bp, Homo sapiens
cacctctaatctggatgttaa

SEQ ID NO: 11692 - DNA, 21 bp, Homo sapiens
tacccagttacttatgattta

SEQ ID NO: 11693 - DNA, 21 bp, Homo sapiens
cccaggtattacacaagccaa

SEQ ID NO: 11694 - DNA, 21 bp, Homo sapiens
acccagttacttatgatttaa

SEQ ID NO: 11695 - DNA, 21 bp, Homo sapiens
aaggttcaagccaaagtataa

SEQ ID NO: 11696 - DNA, 21 bp, Homo sapiens
ccgggatttcagcaagttgaa

SEQ ID NO: 11697 - DNA, 21 bp, Homo sapiens
aagcttaaatttgtatattaa

SEQ ID NO: 11698 - DNA, 21 bp, Homo sapiens
atggttggaaataaccttcta

SEQ ID NO: 11699 - DNA, 21 bp, Homo sapiens
aagtgactttgtaatatcaaa

SEQ ID NO: 11700 - DNA, 21 bp, Homo sapiens
tgcgtttatagtcaacatgta

SEQ ID NO: 11701 - DNA, 21 bp, Homo sapiens
ccgcatgtacttgttcctcaa

SEQ ID NO: 11702 - DNA, 21 bp, Homo sapiens
caccatctattatgatgtcaa

SEQ ID NO: 11703 - DNA, 21 bp, Homo sapiens
ctggtatactgttctcataaa

SEQ ID NO: 11704 - DNA, 21 bp, Homo sapiens
atggctgaatttctattctta

SEQ ID NO: 11705 - DNA, 21 bp, Homo sapiens
cccgggatccttaaattataa

SEQ ID NO: 11706 - DNA, 21 bp, Homo sapiens
aagaagggcaagaataattaa

SEQ ID NO: 11707 - DNA, 21 bp, Homo sapiens
atcagagttcacgaccattaa

SEQ ID NO: 11708 - DNA, 21 bp, Homo sapiens
accagtgatcactttactaaa

SEQ ID NO: 11709 - DNA, 21 bp, Homo sapiens
ctagaacagattcgtaaacaa

SEQ ID NO: 11710 - DNA, 21 bp, Homo sapiens
cccagtgagcttcctcaacaa

SEQ ID NO: 11711 - DNA, 21 bp, Homo sapiens
caggagctgctcagccaagaa

SEQ ID NO: 11712 - DNA, 21 bp, Homo sapiens
caggatgctccggacctgtta

SEQ ID NO: 11713 - DNA, 21 bp, Homo sapiens
agccttgttatttagcaacaa

SEQ ID NO: 11714 - DNA, 21 bp, Homo sapiens
ccggatcctttccagacagaa

SEQ ID NO: 11715 - DNA, 21 bp, Homo sapiens
aaccatcatcaagtccctgaa

SEQ ID NO: 11716 - DNA, 21 bp, Homo sapiens
cagaaccttctagcacacata

SEQ ID NO: 11717 - DNA, 21 bp, Homo sapiens
ccgaaacttcccaacaattat

SEQ ID NO: 11718 - DNA, 21 bp, Homo sapiens
gccactcttatttacctttaa

SEQ ID NO: 11719 - DNA, 21 bp, Homo sapiens
tcgccagtagttatattacaa

SEQ ID NO: 11720 - DNA, 21 bp, Homo sapiens
ccgcggacttaaagcaataaa

SEQ ID NO: 11721 - DNA, 21 bp, Homo sapiens
caggccactagtatcctacta

SEQ ID NO: 11722 - DNA, 21 bp, Homo sapiens
caggtgttatcctatgaggta

SEQ ID NO: 11723 - DNA, 21 bp, Homo sapiens
tcgaggcacaatcatgttcaa

SEQ ID NO: 11724 - DNA, 21 bp, Homo sapiens
tacggtcagaagttctttata

SEQ ID NO: 11725 - DNA, 21 bp, Homo sapiens
cagtgggtgcaggcacaataa

SEQ ID NO: 11726 - DNA, 21 bp, Homo sapiens
agccaggaagacatgaacaaa

SEQ ID NO: 11727 - DNA, 21 bp, Homo sapiens
ccaagtcttgctgcaaattta

SEQ ID NO: 11728 - DNA, 21 bp, Homo sapiens
aagatattctcgtgaaagaaa

SEQ ID NO: 11729 - DNA, 21 bp, Homo sapiens
cacgcgcgccctcatctgcaa

SEQ ID NO: 11730 - DNA, 21 bp, Homo sapiens
aggcgtctgcgtgaagatcaa

SEQ ID NO: 11731 - DNA, 21 bp, Homo sapiens
ctgcgtgaagatcaatcattt

SEQ ID NO: 11732 - DNA, 21 bp, Homo sapiens
caccaacacgctcaacaggaa

SEQ ID NO: 11733 - DNA, 21 bp, Homo sapiens
aacctggagctttattatcaa

SEQ ID NO: 11734 - DNA, 21 bp, Homo sapiens
ttggaacaagattgtcctgaa

SEQ ID NO: 11735 - DNA, 21 bp, Homo sapiens
caccaagtttgttaccaagat

SEQ ID NO: 11736 - DNA, 21 bp, Homo sapiens
cccgggcaagaatgagaccta

SEQ ID NO: 11737 - DNA, 21 bp, Homo sapiens
ctggagtgaattctctcttca

SEQ ID NO: 11738 - DNA, 21 bp, Homo sapiens
ctgggatttgccggtgctcaa

SEQ ID NO: 11739 - DNA, 21 bp, Homo sapiens
atggtcggaatcagatttgaa

SEQ ID NO: 11740 - DNA, 21 bp, Homo sapiens
cagattatatttctagggaca

SEQ ID NO: 11741 - DNA, 21 bp, Homo sapiens
ccacacaagaacaaacgctaa

SEQ ID NO: 11742 - DNA, 21 bp, Homo sapiens
aagaacaaacgctaactaata

SEQ ID NO: 11743 - DNA, 21 bp, Homo sapiens
taccttatatttgcaggtgaa

SEQ ID NO: 11744 - DNA, 21 bp, Homo sapiens
aaagtaggtaatagcatataa

SEQ ID NO: 11745 - DNA, 21 bp, Homo sapiens
tacgatgactttaattgtaat

SEQ ID NO: 11746 - DNA, 21 bp, Homo sapiens
ctgctctatatataacttaaa

SEQ ID NO: 11747 - DNA, 21 bp, Homo sapiens
ctgcagttacctgctttggaa

SEQ ID NO: 11748 - DNA, 21 bp, Homo sapiens
caggagatgccacctgagtta

SEQ ID NO: 11749 - DNA, 21 bp, Homo sapiens
acagactagaatggctgataa

SEQ ID NO: 11750 - DNA, 21 bp, Homo sapiens
aaaggatgtttagacctctta

SEQ ID NO: 11751 - DNA, 21 bp, Homo sapiens
gtggaagatgctgaaatcaaa

SEQ ID NO: 11752 - DNA, 21 bp, Homo sapiens
aagctgttcaccggcatcgaa

SEQ ID NO: 11753 - DNA, 21 bp, Homo sapiens
caccaacgtgtcactgctcaa

SEQ ID NO: 11754 - DNA, 21 bp, Homo sapiens
aaccaacgtcttgaagcagaa

SEQ ID NO: 11755 - DNA, 21 bp, Homo sapiens
ctccctgtgatcagttaccaa

SEQ ID NO: 11756 - DNA, 21 bp, Homo sapiens
ctcgtatgaattcttctgtaa

SEQ ID NO: 11757 - DNA, 21 bp, Homo sapiens
aacctatttaatagacattaa

SEQ ID NO: 11758 - DNA, 21 bp, Homo sapiens
acctatttaatagacattaaa

SEQ ID NO: 11759 - DNA, 21 bp, Homo sapiens
cacaagttacactttcttaaa

SEQ ID NO: 11760 - DNA, 21 bp, Homo sapiens
cacactattagtttgaattaa

SEQ ID NO: 11761 - DNA, 21 bp, Homo sapiens
ccgggaagataactctagcaa

SEQ ID NO: 11762 - DNA, 21 bp, Homo sapiens
ctgatgcaagtgcacctctaa

SEQ ID NO: 11763 - DNA, 21 bp, Homo sapiens
caggtgataattatgtaggaa

SEQ ID NO: 11764 - DNA, 21 bp, Homo sapiens
cacgaggcattgtgtgttgaa

SEQ ID NO: 11765 - DNA, 21 bp, Homo sapiens
cccgtataacatggtggttaa

SEQ ID NO: 11766 - DNA, 21 bp, Homo sapiens
atgaaataaactataactaaa

SEQ ID NO: 11767 - DNA, 21 bp, Homo sapiens
ttcgatatgttctctatgtta

SEQ ID NO: 11768 - DNA, 21 bp, Homo sapiens
aggagcatttatgtaagctta

SEQ ID NO: 11769 - DNA, 21 bp, Homo sapiens
ctgcactagacagagaataaa

SEQ ID NO: 11770 - DNA, 21 bp, Homo sapiens
gagatactcactgatactaaa

SEQ ID NO: 11771 - DNA, 21 bp, Homo sapiens
caggttccctgctacgctaaa

SEQ ID NO: 11772 - DNA, 21 bp, Homo sapiens
cagcagctacctgagtgtcaa

SEQ ID NO: 11773 - DNA, 21 bp, Homo sapiens
ccggaccaccttcaccagcta

SEQ ID NO: 11774 - DNA, 21 bp, Homo sapiens
cagcctcagcccaggcctcaa

SEQ ID NO: 11775 - DNA, 21 bp, Homo sapiens
taggattagtaagatatacaa

SEQ ID NO: 11776 - DNA, 21 bp, Homo sapiens
ctggatgagaacagttacaaa

SEQ ID NO: 11777 - DNA, 21 bp, Homo sapiens
cacaggcaagttccactacaa

SEQ ID NO: 11778 - DNA, 21 bp, Homo sapiens
cgggagaaggtgggtgagaaa

SEQ ID NO: 11779 - DNA, 21 bp, Homo sapiens
caaggctcttaccttacttta

SEQ ID NO: 11780 - DNA, 21 bp, Homo sapiens
tcgctctggagtagaaaccaa

SEQ ID NO: 11781 - DNA, 21 bp, Homo sapiens
tagccacatcttacctgtaaa

SEQ ID NO: 11782 - DNA, 21 bp, Homo sapiens
cggtattaagttgtaatttaa

SEQ ID NO: 11783 - DNA, 21 bp, Homo sapiens
acggagtgaaatgtacatgaa

SEQ ID NO: 11784 - DNA, 21 bp, Homo sapiens
aaggatatgctaagtgatgaa

SEQ ID NO: 11785 - DNA, 21 bp, Homo sapiens
cacatgcgtgtacaaagggaa

SEQ ID NO: 11786 - DNA, 21 bp, Homo sapiens
ccgcaagtttctgcttagcaa

SEQ ID NO: 11787 - DNA, 21 bp, Homo sapiens
ctgcgctactattgggatgaa

SEQ ID NO: 11788 - DNA, 21 bp, Homo sapiens
cagggccacagtgagcattaa

SEQ ID NO: 11789 - DNA, 21 bp, Homo sapiens
cagacttctattgatgctaaa

SEQ ID NO: 11790 - DNA, 21 bp, Homo sapiens
caccttgagttcacagattaa

SEQ ID NO: 11791 - DNA, 21 bp, Homo sapiens
ctggaggaggatagcgactat

SEQ ID NO: 11792 - DNA, 21 bp, Homo sapiens
cgggcagcgtttcaaccgtaa

SEQ ID NO: 11793 - DNA, 21 bp, Homo sapiens
caggcgcttcctaggcaagaa

SEQ ID NO: 11794 - DNA, 21 bp, Homo sapiens
tggcctgtcagtctcaataaa

SEQ ID NO: 11795 - DNA, 21 bp, Homo sapiens
aagcaagatattctatacata

SEQ ID NO: 11796 - DNA, 21 bp, Homo sapiens
aagggaagtgtctttcaataa

SEQ ID NO: 11797 - DNA, 21 bp, Homo sapiens
ttggttgtgtgaataaatata

SEQ ID NO: 11798 - DNA, 21 bp, Homo sapiens
cgggctgtgaatggaccttca

SEQ ID NO: 11799 - DNA, 21 bp, Homo sapiens
ccggcaggccgtcacagtcaa

SEQ ID NO: 11800 - DNA, 21 bp, Homo sapiens
aacctatgaaatagtatccaa

SEQ ID NO: 11801 - DNA, 21 bp, Homo sapiens
ccgcaacaacttggtaggaaa

SEQ ID NO: 11802 - DNA, 21 bp, Homo sapiens
ctggcgggtagcgaaagagta

SEQ ID NO: 11803 - DNA, 21 bp, Homo sapiens
cagacatatctccatgggcta

SEQ ID NO: 11804 - DNA, 21 bp, Homo sapiens
cagcgagaatcctgaccacaa

SEQ ID NO: 11805 - DNA, 21 bp, Homo sapiens
ccagaggttagttgacccgaa

SEQ ID NO: 11806 - DNA, 21 bp, Homo sapiens
cacaaacatggtgattgtcaa

SEQ ID NO: 11807 - DNA, 21 bp, Homo sapiens
ccggctgcccttcttcaccaa

SEQ ID NO: 11808 - DNA, 21 bp, Homo sapiens
cagcggagtgctgaccttgaa

SEQ ID NO: 11809 - DNA, 21 bp, Homo sapiens
caccattggtttcataatgta

SEQ ID NO: 11810 - DNA, 21 bp, Homo sapiens
cacagtaaatacttaatataa

SEQ ID NO: 11811 - DNA, 21 bp, Homo sapiens
cccgagcacttcacatatcaa

SEQ ID NO: 11812 - DNA, 21 bp, Homo sapiens
aacaattacgggcccaagaaa

SEQ ID NO: 11813 - DNA, 21 bp, Homo sapiens
acccttactattccagcgcaa

SEQ ID NO: 11814 - DNA, 21 bp, Homo sapiens
cccataaagcggagacagtaa

SEQ ID NO: 11815 - DNA, 21 bp, Homo sapiens
caccaacatcatgttcctgaa

SEQ ID NO: 11816 - DNA, 21 bp, Homo sapiens
cacagtcaccgaagaaatgaa

SEQ ID NO: 11817 - DNA, 21 bp, Homo sapiens
aagcttaaataaccaccttta

SEQ ID NO: 11818 - DNA, 21 bp, Homo sapiens
cagctggtcctttgtgaagaa

SEQ ID NO: 11819 - DNA, 21 bp, Homo sapiens
accactatctctgaaccttat

SEQ ID NO: 11820 - DNA, 21 bp, Homo sapiens
aagccacaagttaacttgcta

SEQ ID NO: 11821 - DNA, 21 bp, Homo sapiens
cagaagggatttctggtataa

SEQ ID NO: 11822 - DNA, 21 bp, Homo sapiens
aagctgtgagatccacagtta

SEQ ID NO: 11823 - DNA, 21 bp, Homo sapiens
cagattaaagtgattcctgaa

SEQ ID NO: 11824 - DNA, 21 bp, Homo sapiens
ttggaagtacacgactttaaa

SEQ ID NO: 11825 - DNA, 21 bp, Homo sapiens
ctacggctacttcaacgagaa

SEQ ID NO: 11826 - DNA, 21 bp, Homo sapiens
caccaacatgttcatcctcaa

SEQ ID NO: 11827 - DNA, 21 bp, Homo sapiens
ctgtttcatcgtgctcaagaa

SEQ ID NO: 11828 - DNA, 21 bp, Homo sapiens
ctggtggccattgctgtggaa

SEQ ID NO: 11829 - DNA, 21 bp, Homo sapiens
aaccgtgcaggtgacatggaa

SEQ ID NO: 11830 - DNA, 21 bp, Homo sapiens
acacaccactgtcaaagtcaa

SEQ ID NO: 11831 - DNA, 21 bp, Homo sapiens
cacatgagtctctgtgttcaa

SEQ ID NO: 11832 - DNA, 21 bp, Homo sapiens
caggatccacgttgacattta

SEQ ID NO: 11833 - DNA, 21 bp, Homo sapiens
ctgccacatgcaagaagtata

SEQ ID NO: 11834 - DNA, 21 bp, Homo sapiens
caacatggccgtgaactttat

SEQ ID NO: 11835 - DNA, 21 bp, Homo sapiens
taggccgttccttcaaagcaa

SEQ ID NO: 11836 - DNA, 21 bp, Homo sapiens
cagttatggattgaaagttta

SEQ ID NO: 11837 - DNA, 21 bp, Homo sapiens
aacgtactgggacaactgtaa

SEQ ID NO: 11838 - DNA, 21 bp, Homo sapiens
cccatcttcctcggtcatgaa

SEQ ID NO: 11839 - DNA, 21 bp, Homo sapiens
ccggcctgggatccaggctaa

SEQ ID NO: 11840 - DNA, 21 bp, Homo sapiens
cagccctgtattcttattctt

SEQ ID NO: 11841 - DNA, 21 bp, Homo sapiens
cagggtgctgacgaaatccaa

SEQ ID NO: 11842 - DNA, 21 bp, Homo sapiens
cagcaggatctcaacgggaaa

SEQ ID NO: 11843 - DNA, 21 bp, Homo sapiens
ccgggacaagaatttcctcaa

SEQ ID NO: 11844 - DNA, 21 bp, Homo sapiens
cacacccatttcagccatcaa

SEQ ID NO: 11845 - DNA, 21 bp, Homo sapiens
caggatggcagcatcattaaa

SEQ ID NO: 11846 - DNA, 21 bp, Homo sapiens
atggagaaagttgaccagaaa

SEQ ID NO: 11847 - DNA, 21 bp, Homo sapiens
ccggtggagcgggcgcagcta

SEQ ID NO: 11848 - DNA, 21 bp, Homo sapiens
ctggtgctgggtcctcccgaa

SEQ ID NO: 11849 - DNA, 21 bp, Homo sapiens
cccggaccttatcagaggaaa

SEQ ID NO: 11850 - DNA, 21 bp, Homo sapiens
cacgctctgaaggactcgtta

SEQ ID NO: 11851 - DNA, 21 bp, Homo sapiens
aacagacagactggtcgttta

SEQ ID NO: 11852 - DNA, 21 bp, Homo sapiens
caggacttggtttatgagaca

SEQ ID NO: 11853 - DNA, 21 bp, Homo sapiens
aactgtggtagtggagatata

SEQ ID NO: 11854 - DNA, 21 bp, Homo sapiens
cactgagtcctagatagataa

SEQ ID NO: 11855 - DNA, 21 bp, Homo sapiens
ttggcagatactaatctacca

SEQ ID NO: 11856 - DNA, 21 bp, Homo sapiens
ttgagttacactcctgttgaa

SEQ ID NO: 11857 - DNA, 21 bp, Homo sapiens
cagcgacaacaccgacactga

SEQ ID NO: 11858 - DNA, 21 bp, Homo sapiens
atgcactgtattagtgttaga

SEQ ID NO: 11859 - DNA, 21 bp, Homo sapiens
ccgcgtcttctccatgatcat

SEQ ID NO: 11860 - DNA, 21 bp, Homo sapiens
acgtaaggactccaagatgta

SEQ ID NO: 11861 - DNA, 21 bp, Homo sapiens
ctccatcttacgtaccttcta

SEQ ID NO: 11862 - DNA, 21 bp, Homo sapiens
ctgggcatgatggtagactta

SEQ ID NO: 11863 - DNA, 21 bp, Homo sapiens
caaggctgtcattggatccaa

SEQ ID NO: 11864 - DNA, 21 bp, Homo sapiens
caggcacaaatatttcttgaa

SEQ ID NO: 11865 - DNA, 21 bp, Homo sapiens
caggtacaagctaatactcaa

SEQ ID NO: 11866 - DNA, 21 bp, Homo sapiens
gccaatttagatatgctataa

SEQ ID NO: 11867 - DNA, 21 bp, Homo sapiens
ttagatatgctataaatttaa

SEQ ID NO: 11868 - DNA, 21 bp, Homo sapiens
aagcagcctcctgaaaccaaa

SEQ ID NO: 11869 - DNA, 21 bp, Homo sapiens
ccaggtgaacgcacccattaa

SEQ ID NO: 11870 - DNA, 21 bp, Homo sapiens
cagctacatggcagctgtcaa

SEQ ID NO: 11871 - DNA, 21 bp, Homo sapiens
tagactgaagtaccaactaaa

SEQ ID NO: 11872 - DNA, 21 bp, Homo sapiens
cagcattattgaattattcat

SEQ ID NO: 11873 - DNA, 21 bp, Homo sapiens
aagaacatggtctagactgaa

SEQ ID NO: 11874 - DNA, 21 bp, Homo sapiens
gaggattgtgattgtgaacaa

SEQ ID NO: 11875 - DNA, 21 bp, Homo sapiens
agacataatcgtggccatcaa

SEQ ID NO: 11876 - DNA, 21 bp, Homo sapiens
ctgagagtcagtcctccttaa

SEQ ID NO: 11877 - DNA, 21 bp, Homo sapiens
cagaactttatgcttaattta

SEQ ID NO: 11878 - DNA, 21 bp, Homo sapiens
aaggaatgccttggtaagtaa

SEQ ID NO: 11879 - DNA, 21 bp, Homo sapiens
accattaagtgcctaattcaa

SEQ ID NO: 11880 - DNA, 21 bp, Homo sapiens
tagctgctgcttatcatgtaa

SEQ ID NO: 11881 - DNA, 21 bp, Homo sapiens
cactaagtctttgtagataaa

SEQ ID NO: 11882 - DNA, 21 bp, Homo sapiens
tccgacgtatcctgaagggaa

SEQ ID NO: 11883 - DNA, 21 bp, Homo sapiens
cagactcttcacctccgggaa

SEQ ID NO: 11884 - DNA, 21 bp, Homo sapiens
ctgtcggagaatgtcagcaaa

SEQ ID NO: 11885 - DNA, 21 bp, Homo sapiens
cgggcgcaccctcaacctcaa

SEQ ID NO: 11886 - DNA, 21 bp, Homo sapiens
accaatctctatacaccataa

SEQ ID NO: 11887 - DNA, 21 bp, Homo sapiens
aagctcaaactttggaacaaa

SEQ ID NO: 11888 - DNA, 21 bp, Homo sapiens
ccgggtcctggtggaatccta

SEQ ID NO: 11889 - DNA, 21 bp, Homo sapiens
aaccggctgtacggaatccaa

SEQ ID NO: 11890 - DNA, 21 bp, Homo sapiens
aaggtaatggttcatatcata

SEQ ID NO: 11891 - DNA, 21 bp, Homo sapiens
ccgaaataatttgaaaggcaa

SEQ ID NO: 11892 - DNA, 21 bp, Homo sapiens
aaggctggatatcaacaccaa

SEQ ID NO: 11893 - DNA, 21 bp, Homo sapiens
cagaccatcactgcactttaa

SEQ ID NO: 11894 - DNA, 21 bp, Homo sapiens
ttccttgagattcaaaccaaa

SEQ ID NO: 11895 - DNA, 21 bp, Homo sapiens
ttggattaaggttccaaataa

SEQ ID NO: 11896 - DNA, 21 bp, Homo sapiens
caggaataaagttcaacatca

SEQ ID NO: 11897 - DNA, 21 bp, Homo sapiens
caggctcattatcagggtaaa

SEQ ID NO: 11898 - DNA, 21 bp, Homo sapiens
cagcatttagagagcaagcaa

SEQ ID NO: 11899 - DNA, 21 bp, Homo sapiens
ctgcactgtcttactgattta

SEQ ID NO: 11900 - DNA, 21 bp, Homo sapiens
aaggtgaagagaagacattaa

SEQ ID NO: 11901 - DNA, 21 bp, Homo sapiens
ctggttagggtgcacatataa

SEQ ID NO: 11902 - DNA, 21 bp, Homo sapiens
cagaaatgagaagatacaata

SEQ ID NO: 11903 - DNA, 21 bp, Homo sapiens
cagcgtgattccaaacacgaa

SEQ ID NO: 11904 - DNA, 21 bp, Homo sapiens
cacgtttgagagtaccgtaca

SEQ ID NO: 11905 - DNA, 21 bp, Homo sapiens
ctgcccagtaatcctgttcaa

SEQ ID NO: 11906 - DNA, 21 bp, Homo sapiens
aaggtgaagtttggcatgaat

SEQ ID NO: 11907 - DNA, 21 bp, Homo sapiens
aagaaacgaattatatctatt

SEQ ID NO: 11908 - DNA, 21 bp, Homo sapiens
cccagtgggaagtattcttta

SEQ ID NO: 11909 - DNA, 21 bp, Homo sapiens
caggttcatgtgaataagcta

SEQ ID NO: 11910 - DNA, 21 bp, Homo sapiens
aagtacggagccaaagtataa

SEQ ID NO: 11911 - DNA, 21 bp, Homo sapiens
caagatcagcacattgctgaa

SEQ ID NO: 11912 - DNA, 21 bp, Homo sapiens
cagcgatgtcctaaccactga

SEQ ID NO: 11913 - DNA, 21 bp, Homo sapiens
cctgattctgatgataataaa

SEQ ID NO: 11914 - DNA, 21 bp, Homo sapiens
cccggccttgatgctacaaca

SEQ ID NO: 11915 - DNA, 21 bp, Homo sapiens
tagaaggtgtttcaagaataa

SEQ ID NO: 11916 - DNA, 21 bp, Homo sapiens
tacgttctgttcggttatcaa

SEQ ID NO: 11917 - DNA, 21 bp, Homo sapiens
cagggtaatgcttagcatata

SEQ ID NO: 11918 - DNA, 21 bp, Homo sapiens
ccggaagaaagtggagaaaga

SEQ ID NO: 11919 - DNA, 21 bp, Homo sapiens
acgggcgagcgcaataggata

SEQ ID NO: 11920 - DNA, 21 bp, Homo sapiens
ccggttcagtatgaagataat

SEQ ID NO: 11921 - DNA, 21 bp, Homo sapiens
caggaagtcgaattcacctaa

SEQ ID NO: 11922 - DNA, 21 bp, Homo sapiens
caggactgattcatagccata

SEQ ID NO: 11923 - DNA, 21 bp, Homo sapiens
aagacaatgtcccttcttcaa

SEQ ID NO: 11924 - DNA, 21 bp, Homo sapiens
accaagcattgtgaactgcta

SEQ ID NO: 11925 - DNA, 21 bp, Homo sapiens
caacaggatgtcctcttccaa

SEQ ID NO: 11926 - DNA, 21 bp, Homo sapiens
accaaacagcctaaatccgaa

SEQ ID NO: 11927 - DNA, 21 bp, Homo sapiens
ctgcatgaaacaacataacaa

SEQ ID NO: 11928 - DNA, 21 bp, Homo sapiens
ccgcacggagctggccatcaa

SEQ ID NO: 11929 - DNA, 21 bp, Homo sapiens
cagcatggactgggacctgaa

SEQ ID NO: 11930 - DNA, 21 bp, Homo sapiens
gaggccagtgctcgatatata

SEQ ID NO: 11931 - DNA, 21 bp, Homo sapiens
aagcctgccgctgacattgaa

SEQ ID NO: 11932 - DNA, 21 bp, Homo sapiens
aaccttgggcaatgacaataa

SEQ ID NO: 11933 - DNA, 21 bp, Homo sapiens
taccacggttgtaaagcaata

SEQ ID NO: 11934 - DNA, 21 bp, Homo sapiens
cccgaccttatttgagggtat

SEQ ID NO: 11935 - DNA, 21 bp, Homo sapiens
accctagaatttaatcaacaa

SEQ ID NO: 11936 - DNA, 21 bp, Homo sapiens
aaggtgtaccacggttgtaaa

SEQ ID NO: 11937 - DNA, 21 bp, Homo sapiens
ccggcgcctgcaggagttcta

SEQ ID NO: 11938 - DNA, 21 bp, Homo sapiens
tcgcctggtaccggagtctga

SEQ ID NO: 11939 - DNA, 21 bp, Homo sapiens
cactgtggttctcttcaagaa

SEQ ID NO: 11940 - DNA, 21 bp, Homo sapiens
gcgcctggtcacggagttcaa

SEQ ID NO: 11941 - DNA, 21 bp, Homo sapiens
ctgcgcttggtcaaccttgaa

SEQ ID NO: 11942 - DNA, 21 bp, Homo sapiens
gagctgtgcattgtgaataaa

SEQ ID NO: 11943 - DNA, 21 bp, Homo sapiens
caggtgaagttattaaattaa

SEQ ID NO: 11944 - DNA, 21 bp, Homo sapiens
aacctggtgtttggacttcaa

SEQ ID NO: 11945 - DNA, 21 bp, Homo sapiens
ccgcgtggccgagtaccgaaa

SEQ ID NO: 11946 - DNA, 21 bp, Homo sapiens
ctgcgttgtgcataactttca

SEQ ID NO: 11947 - DNA, 21 bp, Homo sapiens
ccgggacaacttcagccctta

SEQ ID NO: 11948 - DNA, 21 bp, Homo sapiens
cccgtgtctaagcatgtgcaa

SEQ ID NO: 11949 - DNA, 21 bp, Homo sapiens
aaggcggatatttcaagagaa

SEQ ID NO: 11950 - DNA, 21 bp, Homo sapiens
acggtctctacccatgtttaa

SEQ ID NO: 11951 - DNA, 21 bp, Homo sapiens
cggtgtgattgtggactacaa

SEQ ID NO: 11952 - DNA, 21 bp, Homo sapiens
caggacctcgatattatcgat

SEQ ID NO: 11953 - DNA, 21 bp, Homo sapiens
cacgcatgagatgaagcataa

SEQ ID NO: 11954 - DNA, 21 bp, Homo sapiens
cagctttgtttaaagatacaa

SEQ ID NO: 11955 - DNA, 21 bp, Homo sapiens
caggcaattaattaggagtaa

SEQ ID NO: 11956 - DNA, 21 bp, Homo sapiens
cggcttcttcactaactataa

SEQ ID NO: 11957 - DNA, 21 bp, Homo sapiens
cagccttacatttgctcatta

SEQ ID NO: 11958 - DNA, 21 bp, Homo sapiens
caggtcgtggacatccctgaa

SEQ ID NO: 11959 - DNA, 21 bp, Homo sapiens
agggttgtaatgagcactaaa

SEQ ID NO: 11960 - DNA, 21 bp, Homo sapiens
aaccatttgttctagaataaa

SEQ ID NO: 11961 - DNA, 21 bp, Homo sapiens
aaggtgatagttgggcatata

SEQ ID NO: 11962 - DNA, 21 bp, Homo sapiens
ttcggtgatgtaagtgtgaaa

SEQ ID NO: 11963 - DNA, 21 bp, Homo sapiens
taggagctggttgaccttgta

SEQ ID NO: 11964 - DNA, 21 bp, Homo sapiens
aagaatcactgccatataata

SEQ ID NO: 11965 - DNA, 21 bp, Homo sapiens
tcggtctagtctggcatgaaa

SEQ ID NO: 11966 - DNA, 21 bp, Homo sapiens
tagtctggcatgaaatagtaa

SEQ ID NO: 11967 - DNA, 21 bp, Homo sapiens
ccggagtaaatcaaactttat

SEQ ID NO: 11968 - DNA, 21 bp, Homo sapiens
cagggtcagattacaagagca

SEQ ID NO: 11969 - DNA, 21 bp, Homo sapiens
ctgggacgtcccagaaggcaa

SEQ ID NO: 11970 - DNA, 21 bp, Homo sapiens
ccaggtgacatcacagtggaa

SEQ ID NO: 11971 - DNA, 21 bp, Homo sapiens
ctgtctgaactggatcataaa

SEQ ID NO: 11972 - DNA, 21 bp, Homo sapiens
aggcatgatcgtcatagctaa

SEQ ID NO: 11973 - DNA, 21 bp, Homo sapiens
acgaaagttaattatacatta

SEQ ID NO: 11974 - DNA, 21 bp, Homo sapiens
acgagagggtagtcacattaa

SEQ ID NO: 11975 - DNA, 21 bp, Homo sapiens
acagatgattgtggccatgaa

SEQ ID NO: 11976 - DNA, 21 bp, Homo sapiens
ctggatatccttccacagcta

SEQ ID NO: 11977 - DNA, 21 bp, Homo sapiens
cacgacaacattgttgagtat

SEQ ID NO: 11978 - DNA, 21 bp, Homo sapiens
accaacttgataggattctaa

SEQ ID NO: 11979 - DNA, 21 bp, Homo sapiens
cagaataaaccaagtgataat

SEQ ID NO: 11980 - DNA, 21 bp, Homo sapiens
atgtgtcaaattagagagcaa

SEQ ID NO: 11981 - DNA, 21 bp, Homo sapiens
caggtcattagcttactataa

SEQ ID NO: 11982 - DNA, 21 bp, Homo sapiens
aaagaatattcttacatataa

SEQ ID NO: 11983 - DNA, 21 bp, Homo sapiens
ccgggagaatgtgttggcata

SEQ ID NO: 11984 - DNA, 21 bp, Homo sapiens
cagcacggcattgttccttat

SEQ ID NO: 11985 - DNA, 21 bp, Homo sapiens
tagggaaatgtttgtactata

SEQ ID NO: 11986 - DNA, 21 bp, Homo sapiens
cagttatttaatcgaagtaat

SEQ ID NO: 11987 - DNA, 21 bp, Homo sapiens
cgggaccgcactgacaggaaa

SEQ ID NO: 11988 - DNA, 21 bp, Homo sapiens
cactaacatcccagactttaa

SEQ ID NO: 11989 - DNA, 21 bp, Homo sapiens
ctcactctttgtggaccacta

SEQ ID NO: 11990 - DNA, 21 bp, Homo sapiens
tcgaatcatatgatctcctaa

SEQ ID NO: 11991 - DNA, 21 bp, Homo sapiens
cacaacctaacaagcaatgaa

SEQ ID NO: 11992 - DNA, 21 bp, Homo sapiens
cagtatgaagttgcccagtaa

SEQ ID NO: 11993 - DNA, 21 bp, Homo sapiens
ccgcgtggacttcaccttcta

SEQ ID NO: 11994 - DNA, 21 bp, Homo sapiens
taggtcttcaatcaaggttta

SEQ ID NO: 11995 - DNA, 21 bp, Homo sapiens
ctcaaaggttgtgtataagta

SEQ ID NO: 11996 - DNA, 21 bp, Homo sapiens
cagtgaaactttgctgtccta

SEQ ID NO: 11997 - DNA, 21 bp, Homo sapiens
aacagtcatactattcattaa

SEQ ID NO: 11998 - DNA, 21 bp, Homo sapiens
ccgcagaaagtttacgtggaa

SEQ ID NO: 11999 - DNA, 21 bp, Homo sapiens
aagggtcaggtagaagagaaa

SEQ ID NO: 12000 - DNA, 21 bp, Homo sapiens
ccgcagagacctggacattaa

SEQ ID NO: 12001 - DNA, 21 bp, Homo sapiens
ctgagccgaaatataagaata

SEQ ID NO: 12002 - DNA, 21 bp, Homo sapiens
caccaatacctaaatctgtta

SEQ ID NO: 12003 - DNA, 21 bp, Homo sapiens
aagcctgtaagtgtacatgta

SEQ ID NO: 12004 - DNA, 21 bp, Homo sapiens
cccagaattatcagaaacgaa

SEQ ID NO: 12005 - DNA, 21 bp, Homo sapiens
cactacagacctgacagtcaa

SEQ ID NO: 12006 - DNA, 21 bp, Homo sapiens
cacgcacacggatgtccttaa

SEQ ID NO: 12007 - DNA, 21 bp, Homo sapiens
ccggccgcccttggacattta

SEQ ID NO: 12008 - DNA, 21 bp, Homo sapiens
caggagatccatccacctatt

SEQ ID NO: 12009 - DNA, 21 bp, Homo sapiens
aagatgttgcttaataattaa

SEQ ID NO: 12010 - DNA, 21 bp, Homo sapiens
aaggtgtatttctacaattta

SEQ ID NO: 12011 - DNA, 21 bp, Homo sapiens
aaggtggtaattcgaagatta

SEQ ID NO: 12012 - DNA, 21 bp, Homo sapiens
cagagcatacatcaactttaa

SEQ ID NO: 12013 - DNA, 21 bp, Homo sapiens
gacggttagttgccaaattca

SEQ ID NO: 12014 - DNA, 21 bp, Homo sapiens
cccacagcactcattcctgaa

SEQ ID NO: 12015 - DNA, 21 bp, Homo sapiens
ctgcctgatgatggacatgaa

SEQ ID NO: 12016 - DNA, 21 bp, Homo sapiens
aaggatagcattatgaacata

SEQ ID NO: 12017 - DNA, 21 bp, Homo sapiens
accatagttgctattgatgaa

SEQ ID NO: 12018 - DNA, 21 bp, Homo sapiens
acacgagtcaatcttaatgaa

SEQ ID NO: 12019 - DNA, 21 bp, Homo sapiens
atcgctatgttcaggaacaaa

SEQ ID NO: 12020 - DNA, 21 bp, Homo sapiens
atggatttagtagtatgctta

SEQ ID NO: 12021 - DNA, 21 bp, Homo sapiens
ccagaccatcatgcacattca

SEQ ID NO: 12022 - DNA, 21 bp, Homo sapiens
cacgcacctcatggaggagaa

SEQ ID NO: 12023 - DNA, 21 bp, Homo sapiens
ccaggagaacatgatcgtgta

SEQ ID NO: 12024 - DNA, 21 bp, Homo sapiens
aaagagcgtccttgtcatcaa

SEQ ID NO: 12025 - DNA, 21 bp, Homo sapiens
aaggctcatcttaaatttgta

SEQ ID NO: 12026 - DNA, 21 bp, Homo sapiens
accagagaattccataattaa

SEQ ID NO: 12027 - DNA, 21 bp, Homo sapiens
caaggtcacttcgggcagaaa

SEQ ID NO: 12028 - DNA, 21 bp, Homo sapiens
cactagtgtctcagaccagaa

SEQ ID NO: 12029 - DNA, 21 bp, Homo sapiens
caggaggagccagcaccatta

SEQ ID NO: 12030 - DNA, 21 bp, Homo sapiens
cagcttgttgggcgtttccaa

SEQ ID NO: 12031 - DNA, 21 bp, Homo sapiens
gacgctgaagacatacctgaa

SEQ ID NO: 12032 - DNA, 21 bp, Homo sapiens
cacgtatatggtggagcatga

SEQ ID NO: 12033 - DNA, 21 bp, Homo sapiens
acctataagtctagtagcaaa

SEQ ID NO: 12034 - DNA, 21 bp, Homo sapiens
aacgttcatcgagcagatgaa

SEQ ID NO: 12035 - DNA, 21 bp, Homo sapiens
tccataagtgactgtgctaaa

SEQ ID NO: 12036 - DNA, 21 bp, Homo sapiens
cagtggttaacaggcaataaa

SEQ ID NO: 12037 - DNA, 21 bp, Homo sapiens
caggatggtaataggttaaga

SEQ ID NO: 12038 - DNA, 21 bp, Homo sapiens
atgtgtctagtgcatccttaa

SEQ ID NO: 12039 - DNA, 21 bp, Homo sapiens
cagggtgtattgtagcttata

SEQ ID NO: 12040 - DNA, 21 bp, Homo sapiens
caggaatttgttcaccatgat

SEQ ID NO: 12041 - DNA, 21 bp, Homo sapiens
aagcttcgaactatacttcaa

SEQ ID NO: 12042 - DNA, 21 bp, Homo sapiens
cagtacagtattgacaataaa

SEQ ID NO: 12043 - DNA, 21 bp, Homo sapiens
ctcggtaaccctaataaagaa

SEQ ID NO: 12044 - DNA, 21 bp, Homo sapiens
caggtttgcttcaaacaagta

SEQ ID NO: 12045 - DNA, 21 bp, Homo sapiens
ctgcctggagatggacattaa

SEQ ID NO: 12046 - DNA, 21 bp, Homo sapiens
caaggtattctccaagttcta

SEQ ID NO: 12047 - DNA, 21 bp, Homo sapiens
aagttctgtgacaaagatgaa

SEQ ID NO: 12048 - DNA, 21 bp, Homo sapiens
cagcctcacaccagaaatatt

SEQ ID NO: 12049 - DNA, 21 bp, Homo sapiens
aacctgccttgacggcataaa

SEQ ID NO: 12050 - DNA, 21 bp, Homo sapiens
aagacctgtgagcttgtctta

SEQ ID NO: 12051 - DNA, 21 bp, Homo sapiens
ctgagtattagacacgataaa

SEQ ID NO: 12052 - DNA, 21 bp, Homo sapiens
caggatcgtgctggcggccca

SEQ ID NO: 12053 - DNA, 21 bp, Homo sapiens
ctgcaacttagtggaaggaat

SEQ ID NO: 12054 - DNA, 21 bp, Homo sapiens
aagggctgtgagcaggtgtaa

SEQ ID NO: 12055 - DNA, 21 bp, Homo sapiens
cagggagatccagtcccttga

SEQ ID NO: 12056 - DNA, 21 bp, Homo sapiens
caggaccagatgataccatga

SEQ ID NO: 12057 - DNA, 21 bp, Homo sapiens
cactgggatggtccttgttaa

SEQ ID NO: 12058 - DNA, 21 bp, Homo sapiens
ccctctattgccaactgttaa

SEQ ID NO: 12059 - DNA, 21 bp, Homo sapiens
gtcctatataacgatcttcaa

SEQ ID NO: 12060 - DNA, 21 bp, Homo sapiens
acctgcctcatcgatattata

SEQ ID NO: 12061 - DNA, 21 bp, Homo sapiens
ccgcaggaagctggaattgat

SEQ ID NO: 12062 - DNA, 21 bp, Homo sapiens
ttgcagattgtcatgaataaa

SEQ ID NO: 12063 - DNA, 21 bp, Homo sapiens
tacgttggaatagatcctcta

SEQ ID NO: 12064 - DNA, 21 bp, Homo sapiens
atgcctgaacctgttatctaa

SEQ ID NO: 12065 - DNA, 21 bp, Homo sapiens
caggtctaaggattaactata

SEQ ID NO: 12066 - DNA, 21 bp, Homo sapiens
cagacctagtattctaagtta

SEQ ID NO: 12067 - DNA, 21 bp, Homo sapiens
cccagaattgctcttccataa

SEQ ID NO: 12068 - DNA, 21 bp, Homo sapiens
cccaatgtcattatgtaatta

SEQ ID NO: 12069 - DNA, 21 bp, Homo sapiens
cagggagatcttcaagttcaa

SEQ ID NO: 12070 - DNA, 21 bp, Homo sapiens
cagccgataaacattgattaa

SEQ ID NO: 12071 - DNA, 21 bp, Homo sapiens
accaatcaggttgaacaagaa

SEQ ID NO: 12072 - DNA, 21 bp, Homo sapiens
cagcctctgactcgagcatta

SEQ ID NO: 12073 - DNA, 21 bp, Homo sapiens
caagactaaattggaaagaaa

SEQ ID NO: 12074 - DNA, 21 bp, Homo sapiens
caggaggatgggccaactcaa

SEQ ID NO: 12075 - DNA, 21 bp, Homo sapiens
tcggaggtgactgacagatat

SEQ ID NO: 12076 - DNA, 21 bp, Homo sapiens
ctcgtgctgcaaagagtgata

SEQ ID NO: 12077 - DNA, 21 bp, Homo sapiens
aaggtagggcagtatgtttaa

SEQ ID NO: 12078 - DNA, 21 bp, Homo sapiens
ctgcatggcaataactcataa

SEQ ID NO: 12079 - DNA, 21 bp, Homo sapiens
caggagcaagtggagctggaa

SEQ ID NO: 12080 - DNA, 21 bp, Homo sapiens
ctgcgctacctgcatcagcaa

SEQ ID NO: 12081 - DNA, 21 bp, Homo sapiens
gagggcaatactaaacttaaa

SEQ ID NO: 12082 - DNA, 21 bp, Homo sapiens
ctcctcaatcctgaaattcaa

SEQ ID NO: 12083 - DNA, 21 bp, Homo sapiens
gtgcaggacaccgacatggaa

SEQ ID NO: 12084 - DNA, 21 bp, Homo sapiens
aggaagcagcagggtcaccaa

SEQ ID NO: 12085 - DNA, 21 bp, Homo sapiens
ctagatttgtttgataatcaa

SEQ ID NO: 12086 - DNA, 21 bp, Homo sapiens
ctggaaattgatcagcattaa

SEQ ID NO: 12087 - DNA, 21 bp, Homo sapiens
tcgaatgttctcacctattaa

SEQ ID NO: 12088 - DNA, 21 bp, Homo sapiens
ccgggacgagatggacataga

SEQ ID NO: 12089 - DNA, 21 bp, Homo sapiens
cagaatgttatcatactacat

SEQ ID NO: 12090 - DNA, 21 bp, Homo sapiens
aaggttagattccaataaata

SEQ ID NO: 12091 - DNA, 21 bp, Homo sapiens
aaggaggagcttcgcatacaa

SEQ ID NO: 12092 - DNA, 21 bp, Homo sapiens
atggatgctcttaaagaagaa

SEQ ID NO: 12093 - DNA, 21 bp, Homo sapiens
aaggagatgttaataattaaa

SEQ ID NO: 12094 - DNA, 21 bp, Homo sapiens
cagggtcattacagagattaa

SEQ ID NO: 12095 - DNA, 21 bp, Homo sapiens
caggtttgatgtggaatcaca

SEQ ID NO: 12096 - DNA, 21 bp, Homo sapiens
caccgccagtgtcataccaaa

SEQ ID NO: 12097 - DNA, 21 bp, Homo sapiens
ttggtttagatcaaagttcaa

SEQ ID NO: 12098 - DNA, 21 bp, Homo sapiens
aacgagtttataatcctataa

SEQ ID NO: 12099 - DNA, 21 bp, Homo sapiens
cagccagagtacagtcctgaa

SEQ ID NO: 12100 - DNA, 21 bp, Homo sapiens
agcgtccaagaagttgaataa

SEQ ID NO: 12101 - DNA, 21 bp, Homo sapiens
ctcggagttggcccagaataa

SEQ ID NO: 12102 - DNA, 21 bp, Homo sapiens
ccgaaaggccgccgaagacaa

SEQ ID NO: 12103 - DNA, 21 bp, Homo sapiens
acggacggttataagaggcta

SEQ ID NO: 12104 - DNA, 21 bp, Homo sapiens
accagtgtgtttacttgtaaa

SEQ ID NO: 12105 - DNA, 21 bp, Homo sapiens
ccgcatcgtcagtatggacaa

SEQ ID NO: 12106 - DNA, 21 bp, Homo sapiens
cacctggattatgagctccta

SEQ ID NO: 12107 - DNA, 21 bp, Homo sapiens
tcccatactgttacccataaa

SEQ ID NO: 12108 - DNA, 21 bp, Homo sapiens
ctgcttgacactgacttacta

SEQ ID NO: 12109 - DNA, 21 bp, Homo sapiens
ctggcttagacaccttctcaa

SEQ ID NO: 12110 - DNA, 21 bp, Homo sapiens
ggccttgagtgtccacattaa

SEQ ID NO: 12111 - DNA, 21 bp, Homo sapiens
caggccctgtttctacctcaa

SEQ ID NO: 12112 - DNA, 21 bp, Homo sapiens
ctgggagaagctgttaaagaa

SEQ ID NO: 12113 - DNA, 21 bp, Homo sapiens
ttgcattctaatgttattaaa

SEQ ID NO: 12114 - DNA, 21 bp, Homo sapiens
aagaatcagaatggcaatata

SEQ ID NO: 12115 - DNA, 21 bp, Homo sapiens
aagcataagcttcccatttca

SEQ ID NO: 12116 - DNA, 21 bp, Homo sapiens
tcccaataaagtgttgcacaa

SEQ ID NO: 12117 - DNA, 21 bp, Homo sapiens
cagagtggtggtggtgtcaca

SEQ ID NO: 12118 - DNA, 21 bp, Homo sapiens
gacgctatgaccgtaatgaaa

SEQ ID NO: 12119 - DNA, 21 bp, Homo sapiens
ccggacctcctaagtccagaa

SEQ ID NO: 12120 - DNA, 21 bp, Homo sapiens
acccatgagcgtagagatcaa

SEQ ID NO: 12121 - DNA, 21 bp, Homo sapiens
ccggaagttaaagcacactta

SEQ ID NO: 12122 - DNA, 21 bp, Homo sapiens
cgggctcaaagtaggattcaa

SEQ ID NO: 12123 - DNA, 21 bp, Homo sapiens
ttgactctttgtatttcaata

SEQ ID NO: 12124 - DNA, 21 bp, Homo sapiens
ctgggaggacgtgaagactga

SEQ ID NO: 12125 - DNA, 21 bp, Homo sapiens
ccgcccaattatcgcgaccaa

SEQ ID NO: 12126 - DNA, 21 bp, Homo sapiens
ccgcttcccatccttccttaa

SEQ ID NO: 12127 - DNA, 21 bp, Homo sapiens
cagcctctctctggccgtcaa

SEQ ID NO: 12128 - DNA, 21 bp, Homo sapiens
ctgaggaagaagagatagcaa

SEQ ID NO: 12129 - DNA, 21 bp, Homo sapiens
ctgagctgtagggaaactgaa

SEQ ID NO: 12130 - DNA, 21 bp, Homo sapiens
caccctggagcttcaaataaa

SEQ ID NO: 12131 - DNA, 21 bp, Homo sapiens
caggctttgcatccttgggaa

SEQ ID NO: 12132 - DNA, 21 bp, Homo sapiens
acggagtataaggaactcaca

SEQ ID NO: 12133 - DNA, 21 bp, Homo sapiens
cagcatttgcaggaattacaa

SEQ ID NO: 12134 - DNA, 21 bp, Homo sapiens
cagattgagatgaatttgcaa

SEQ ID NO: 12135 - DNA, 21 bp, Homo sapiens
tacgatgttgattataacatt

SEQ ID NO: 12136 - DNA, 21 bp, Homo sapiens
atggacctacatacacacaaa

SEQ ID NO: 12137 - DNA, 21 bp, Homo sapiens
cagaggtactccatctcccaa

SEQ ID NO: 12138 - DNA, 21 bp, Homo sapiens
tccggctatcattgaaagcga

SEQ ID NO: 12139 - DNA, 21 bp, Homo sapiens
cacggccaagcacgccaacaa

SEQ ID NO: 12140 - DNA, 21 bp, Homo sapiens
aggtctcaagtttgacatgaa

SEQ ID NO: 12141 - DNA, 21 bp, Homo sapiens
ctcccgagagtactacttcaa

SEQ ID NO: 12142 - DNA, 21 bp, Homo sapiens
ctggaccgcattggtagccta

SEQ ID NO: 12143 - DNA, 21 bp, Homo sapiens
cacgcacggctttgacgacaa

SEQ ID NO: 12144 - DNA, 21 bp, Homo sapiens
tggccggaacttcgacaagaa

SEQ ID NO: 12145 - DNA, 21 bp, Homo sapiens
caccctgttagctctgattaa

SEQ ID NO: 12146 - DNA, 21 bp, Homo sapiens
caggaacactaaggtcaaata

SEQ ID NO: 12147 - DNA, 21 bp, Homo sapiens
caggagagacttgtaggtaca

SEQ ID NO: 12148 - DNA, 21 bp, Homo sapiens
ccgcaagatatagacaggcta

SEQ ID NO: 12149 - DNA, 21 bp, Homo sapiens
aagaccaaatactgaagttaa

SEQ ID NO: 12150 - DNA, 21 bp, Homo sapiens
ctggagctatatataaatctt

SEQ ID NO: 12151 - DNA, 21 bp, Homo sapiens
cagggtgatttctataaatca

SEQ ID NO: 12152 - DNA, 21 bp, Homo sapiens
tccgattatgaagcagtttaa

SEQ ID NO: 12153 - DNA, 21 bp, Homo sapiens
cagcttagacacctccaagaa

SEQ ID NO: 12154 - DNA, 21 bp, Homo sapiens
caggaagaagaaatttgggaa

SEQ ID NO: 12155 - DNA, 21 bp, Homo sapiens
agccatttacttgcaccggaa

SEQ ID NO: 12156 - DNA, 21 bp, Homo sapiens
ccggaaggagtactcccagaa

SEQ ID NO: 12157 - DNA, 21 bp, Homo sapiens
cagccacatcaccaacctcaa

SEQ ID NO: 12158 - DNA, 21 bp, Homo sapiens
ctgcagcttgatcgccttcaa

SEQ ID NO: 12159 - DNA, 21 bp, Homo sapiens
caggttctggttaccacccaa

SEQ ID NO: 12160 - DNA, 21 bp, Homo sapiens
aaggacattcgtagtgatgta

SEQ ID NO: 12161 - DNA, 21 bp, Homo sapiens
cagacagtgtttaacaagtaa

SEQ ID NO: 12162 - DNA, 21 bp, Homo sapiens
caggaggaaagcagtgacaaa

SEQ ID NO: 12163 - DNA, 21 bp, Homo sapiens
tcccagtgaaataaacatgta

SEQ ID NO: 12164 - DNA, 21 bp, Homo sapiens
atccagaaattcgatgaccaa

SEQ ID NO: 12165 - DNA, 21 bp, Homo sapiens
caccaaatgaaagaagatcaa

SEQ ID NO: 12166 - DNA, 21 bp, Homo sapiens
cccaacatactagtcaataaa

SEQ ID NO: 12167 - DNA, 21 bp, Homo sapiens
ctggaatacctgactaacaaa

SEQ ID NO: 12168 - DNA, 21 bp, Homo sapiens
tcccatttagtataactataa

SEQ ID NO: 12169 - DNA, 21 bp, Homo sapiens
cagggtcagttaggaaatgaa

SEQ ID NO: 12170 - DNA, 21 bp, Homo sapiens
cagaaacaattaagtcatgaa

SEQ ID NO: 12171 - DNA, 21 bp, Homo sapiens
ctgatctaacttctagctaaa

SEQ ID NO: 12172 - DNA, 21 bp, Homo sapiens
aggcatattgttcatgtttaa

SEQ ID NO: 12173 - DNA, 21 bp, Homo sapiens
cagattgatgaggacattcaa

SEQ ID NO: 12174 - DNA, 21 bp, Homo sapiens
ccgatccattatcaacataaa

SEQ ID NO: 12175 - DNA, 21 bp, Homo sapiens
acggatctacatctacccaga

SEQ ID NO: 12176 - DNA, 21 bp, Homo sapiens
accactgtactgagtgaccaa

SEQ ID NO: 12177 - DNA, 21 bp, Homo sapiens
tcgggacatgtatgtacccaa

SEQ ID NO: 12178 - DNA, 21 bp, Homo sapiens
cccgaggtatttcacctctta

SEQ ID NO: 12179 - DNA, 21 bp, Homo sapiens
ctaggatgacatgatgttata

SEQ ID NO: 12180 - DNA, 21 bp, Homo sapiens
cagacagtactttaaatgtta

SEQ ID NO: 12181 - DNA, 21 bp, Homo sapiens
cccgctagatatgccattcaa

SEQ ID NO: 12182 - DNA, 21 bp, Homo sapiens
cacccaagttcttatacgtta

SEQ ID NO: 12183 - DNA, 21 bp, Homo sapiens
acctgacttgctgctattaaa

SEQ ID NO: 12184 - DNA, 21 bp, Homo sapiens
ctgcggtttctctgataccaa

SEQ ID NO: 12185 - DNA, 21 bp, Homo sapiens
cgggaaatccttcaacagaaa

SEQ ID NO: 12186 - DNA, 21 bp, Homo sapiens
tacctgtgaatgaacaatgaa

SEQ ID NO: 12187 - DNA, 21 bp, Homo sapiens
atcgttcaagagaatgattaa

SEQ ID NO: 12188 - DNA, 21 bp, Homo sapiens
ctccaatatgaacaagataaa

SEQ ID NO: 12189 - DNA, 21 bp, Homo sapiens
tacagttgtgttgccatttaa

SEQ ID NO: 12190 - DNA, 21 bp, Homo sapiens
ctggaaagatgtttactacaa

SEQ ID NO: 12191 - DNA, 21 bp, Homo sapiens
aaggaggaatttgtttctaaa

SEQ ID NO: 12192 - DNA, 21 bp, Homo sapiens
caggatgttcagggccttaaa

SEQ ID NO: 12193 - DNA, 21 bp, Homo sapiens
agggttggaaataccaagtaa

SEQ ID NO: 12194 - DNA, 21 bp, Homo sapiens
tacatataatatgtatgagaa

SEQ ID NO: 12195 - DNA, 21 bp, Homo sapiens
caggagcagagttaaaggtaa

SEQ ID NO: 12196 - DNA, 21 bp, Homo sapiens
ctggtagcaagcaataataaa

SEQ ID NO: 12197 - DNA, 21 bp, Homo sapiens
gaggtccaggaagatacgaaa

SEQ ID NO: 12198 - DNA, 21 bp, Homo sapiens
cagattctaaggatccgcgaa

SEQ ID NO: 12199 - DNA, 21 bp, Homo sapiens
acccaagtgcttggaaatata

SEQ ID NO: 12200 - DNA, 21 bp, Homo sapiens
ctgcttgagacagatattaga

SEQ ID NO: 12201 - DNA, 21 bp, Homo sapiens
cagctagtgatttccatagaa

SEQ ID NO: 12202 - DNA, 21 bp, Homo sapiens
cagcattatgtgagaccaaat

SEQ ID NO: 12203 - DNA, 21 bp, Homo sapiens
aacgatgatgatgaacacaga

SEQ ID NO: 12204 - DNA, 21 bp, Homo sapiens
cagctgtgatttcatcccgaa

SEQ ID NO: 12205 - DNA, 21 bp, Homo sapiens
cagattaaacctgaatattta

SEQ ID NO: 12206 - DNA, 21 bp, Homo sapiens
atggagtttcatggccatgaa

SEQ ID NO: 12207 - DNA, 21 bp, Homo sapiens
aaggttcatttacattaatta

SEQ ID NO: 12208 - DNA, 21 bp, Homo sapiens
cagcttagtcattccaggcaa

SEQ ID NO: 12209 - DNA, 21 bp, Homo sapiens
tagatactagattgtattgaa

SEQ ID NO: 12210 - DNA, 21 bp, Homo sapiens
aaggagctatctgtttatgta

SEQ ID NO: 12211 - DNA, 21 bp, Homo sapiens
atcacaaatgatcatacttaa

SEQ ID NO: 12212 - DNA, 21 bp, Homo sapiens
aagcaagataacggcatataa

SEQ ID NO: 12213 - DNA, 21 bp, Homo sapiens
agcccagaatttgaagctcaa

SEQ ID NO: 12214 - DNA, 21 bp, Homo sapiens
agggagctagaggaaccttta

SEQ ID NO: 12215 - DNA, 21 bp, Homo sapiens
caggaggattacctatacaaa

SEQ ID NO: 12216 - DNA, 21 bp, Homo sapiens
ctccttgtaaataaagctata

SEQ ID NO: 12217 - DNA, 21 bp, Homo sapiens
cgagcagattatgatgatcaa

SEQ ID NO: 12218 - DNA, 21 bp, Homo sapiens
aagacaagtctttaagggtaa

SEQ ID NO: 12219 - DNA, 21 bp, Homo sapiens
cagaggatgtccattaatcaa

SEQ ID NO: 12220 - DNA, 21 bp, Homo sapiens
cacgtgggaaaccaaacttta

SEQ ID NO: 12221 - DNA, 21 bp, Homo sapiens
aagcaatttatagaacatata

SEQ ID NO: 12222 - DNA, 21 bp, Homo sapiens
accaagaaacttcaagctaaa

SEQ ID NO: 12223 - DNA, 21 bp, Homo sapiens
ctggtttgaaatgaaacctta

SEQ ID NO: 12224 - DNA, 21 bp, Homo sapiens
aacacctagattagcattcaa

SEQ ID NO: 12225 - DNA, 21 bp, Homo sapiens
tactataagggttatagtaaa

SEQ ID NO: 12226 - DNA, 21 bp, Homo sapiens
aactagtattgcaataagcaa

SEQ ID NO: 12227 - DNA, 21 bp, Homo sapiens
ctgcatgaacgtaatccagta

SEQ ID NO: 12228 - DNA, 21 bp, Homo sapiens
ccggcagaatagtgagtagaa

SEQ ID NO: 12229 - DNA, 21 bp, Homo sapiens
tcccagaatcgggaaagtgaa

SEQ ID NO: 12230 - DNA, 21 bp, Homo sapiens
cgcgggcaaggtcgactacaa

SEQ ID NO: 12231 - DNA, 21 bp, Homo sapiens
cccgtggaaagtgcagtttaa

SEQ ID NO: 12232 - DNA, 21 bp, Homo sapiens
aacgttgaggcaattcctaaa

SEQ ID NO: 12233 - DNA, 21 bp, Homo sapiens
cagcctggtgctaatccataa

SEQ ID NO: 12234 - DNA, 21 bp, Homo sapiens
ccgagacatcctcgctttaaa

SEQ ID NO: 12235 - DNA, 21 bp, Homo sapiens
ccaactatacctgtagaaata

SEQ ID NO: 12236 - DNA, 21 bp, Homo sapiens
ttggtaattatcagcaggaaa

SEQ ID NO: 12237 - DNA, 21 bp, Homo sapiens
aagactcagaatcttaaggaa

SEQ ID NO: 12238 - DNA, 21 bp, Homo sapiens
gaggtttataggtttaagtaa

SEQ ID NO: 12239 - DNA, 21 bp, Homo sapiens
cagcttcgttatgaacaagaa

SEQ ID NO: 12240 - DNA, 21 bp, Homo sapiens
cagaaggtactgttacattaa

SEQ ID NO: 12241 - DNA, 21 bp, Homo sapiens
cacctttcaagtactaagtta

SEQ ID NO: 12242 - DNA, 21 bp, Homo sapiens
ctgcacaaggctgacacataa

SEQ ID NO: 12243 - DNA, 21 bp, Homo sapiens
ctgaattatcagggcattcta

SEQ ID NO: 12244 - DNA, 21 bp, Homo sapiens
cacgatctagtctgtggtgta

SEQ ID NO: 12245 - DNA, 21 bp, Homo sapiens
cagccttgttgatgcaataaa

SEQ ID NO: 12246 - DNA, 21 bp, Homo sapiens
cacgccgagggaatactttaa

SEQ ID NO: 12247 - DNA, 21 bp, Homo sapiens
ctggatgttgctgcattctaa

SEQ ID NO: 12248 - DNA, 21 bp, Homo sapiens
aacgaatatgcaaaccatgta

SEQ ID NO: 12249 - DNA, 21 bp, Homo sapiens
caccactaatttgaagataaa

SEQ ID NO: 12250 - DNA, 21 bp, Homo sapiens
caggagttggtaaataaacta

SEQ ID NO: 12251 - DNA, 21 bp, Homo sapiens
atggaggagctcatagctaaa

SEQ ID NO: 12252 - DNA, 21 bp, Homo sapiens
cagcgggatggctacaacaca

SEQ ID NO: 12253 - DNA, 21 bp, Homo sapiens
ttcgctcaaattatccctaaa

SEQ ID NO: 12254 - DNA, 21 bp, Homo sapiens
cagagagaaattgagtagaaa

SEQ ID NO: 12255 - DNA, 21 bp, Homo sapiens
taggattcattctccatgtaa

SEQ ID NO: 12256 - DNA, 21 bp, Homo sapiens
ctgtcctgtcttatactgcaa

SEQ ID NO: 12257 - DNA, 21 bp, Homo sapiens
ttgatgtgtgataatctcata

SEQ ID NO: 12258 - DNA, 21 bp, Homo sapiens
ccggagcagtatgctaagcga

SEQ ID NO: 12259 - DNA, 21 bp, Homo sapiens
ccgggcttatcggagatccaa

SEQ ID NO: 12260 - DNA, 21 bp, Homo sapiens
tagggacacagtgatgtacta

SEQ ID NO: 12261 - DNA, 21 bp, Homo sapiens
caggaatgattggttcttaga

SEQ ID NO: 12262 - DNA, 21 bp, Homo sapiens
cgcgattattgctaattggaa

SEQ ID NO: 12263 - DNA, 21 bp, Homo sapiens
cagcctaccatccagaagtaa

SEQ ID NO: 12264 - DNA, 21 bp, Homo sapiens
cagctttggaaacgcacctaa

SEQ ID NO: 12265 - DNA, 21 bp, Homo sapiens
ccaatagatattctctctaaa

SEQ ID NO: 12266 - DNA, 21 bp, Homo sapiens
catgtattacccagaatttaa

SEQ ID NO: 12267 - DNA, 21 bp, Homo sapiens
ctgaagttaattgtactataa

SEQ ID NO: 12268 - DNA, 21 bp, Homo sapiens
ttggagaaatatggaatgaaa

SEQ ID NO: 12269 - DNA, 21 bp, Homo sapiens
atgtatgttaattgaaatgaa

SEQ ID NO: 12270 - DNA, 21 bp, Homo sapiens
ctggcatttctccatctacta

SEQ ID NO: 12271 - DNA, 21 bp, Homo sapiens
cagggcgccaataacaggcaa

SEQ ID NO: 12272 - DNA, 21 bp, Homo sapiens
aagacttacatcggatttcaa

SEQ ID NO: 12273 - DNA, 21 bp, Homo sapiens
cgcgaactcaaagaactataa

SEQ ID NO: 12274 - DNA, 21 bp, Homo sapiens
ctcgatcggtcagtcaggaaa

SEQ ID NO: 12275 - DNA, 21 bp, Homo sapiens
ccgcctcaacatggtggtcca

SEQ ID NO: 12276 - DNA, 21 bp, Homo sapiens
accattataatcctaactcat

SEQ ID NO: 12277 - DNA, 21 bp, Homo sapiens
cagaagagagagaatcttgta

SEQ ID NO: 12278 - DNA, 21 bp, Homo sapiens
atgaatattgtgctttattta

SEQ ID NO: 12279 - DNA, 21 bp, Homo sapiens
atggaatatcttaaagagaaa

SEQ ID NO: 12280 - DNA, 21 bp, Homo sapiens
aaggatggactagaagataaa

SEQ ID NO: 12281 - DNA, 21 bp, Homo sapiens
caggatgttggtaatgagcaa

SEQ ID NO: 12282 - DNA, 21 bp, Homo sapiens
caggctttaaagattaaagaa

SEQ ID NO: 12283 - DNA, 21 bp, Homo sapiens
caagcagattccaaaccacta

SEQ ID NO: 12284 - DNA, 21 bp, Homo sapiens
ctcaatgatcccgggcattta

SEQ ID NO: 12285 - DNA, 21 bp, Homo sapiens
gtggacggaggacacaataaa

SEQ ID NO: 12286 - DNA, 21 bp, Homo sapiens
cacgggatatgttgatagaga

SEQ ID NO: 12287 - DNA, 21 bp, Homo sapiens
cacagtatcaaggcaggacaa

SEQ ID NO: 12288 - DNA, 21 bp, Homo sapiens
caggattagttcccagtctta

SEQ ID NO: 12289 - DNA, 21 bp, Homo sapiens
cagcgagttcaggagactcta

SEQ ID NO: 12290 - DNA, 21 bp, Homo sapiens
ctagatccaaatattgatata

SEQ ID NO: 12291 - DNA, 21 bp, Homo sapiens
tagcaatatctcgtttgctaa

SEQ ID NO: 12292 - DNA, 21 bp, Homo sapiens
aagaataatgatcatagggaa

SEQ ID NO: 12293 - DNA, 21 bp, Homo sapiens
accgagtgtttcgatgagtaa

SEQ ID NO: 12294 - DNA, 21 bp, Homo sapiens
ttggtttaagttcaaatgaat

SEQ ID NO: 12295 - DNA, 21 bp, Homo sapiens
aagggctccttctgctattta

SEQ ID NO: 12296 - DNA, 21 bp, Homo sapiens
cactgagcatttaatttacaa

SEQ ID NO: 12297 - DNA, 21 bp, Homo sapiens
ctggtacgtcaaggagcctaa

SEQ ID NO: 12298 - DNA, 21 bp, Homo sapiens
tagcgaacactgagcatttaa

SEQ ID NO: 12299 - DNA, 21 bp, Homo sapiens
caggcctttgtaagttgtcaa

SEQ ID NO: 12300 - DNA, 21 bp, Homo sapiens
caggtgctaaagagagcagta

SEQ ID NO: 12301 - DNA, 21 bp, Homo sapiens
caccgcattagcaatatacaa

SEQ ID NO: 12302 - DNA, 21 bp, Homo sapiens
ccggcccaacatcatcctcta

SEQ ID NO: 12303 - DNA, 21 bp, Homo sapiens
cagctcaaacacaccaataaa

SEQ ID NO: 12304 - DNA, 21 bp, Homo sapiens
taccttggagacgacctttaa

SEQ ID NO: 12305 - DNA, 21 bp, Homo sapiens
actgaccaatgaagaatttaa

SEQ ID NO: 12306 - DNA, 21 bp, Homo sapiens
aagcgggagcaggatgtctta

SEQ ID NO: 12307 - DNA, 21 bp, Homo sapiens
cgcccagagcaagaaatgata

SEQ ID NO: 12308 - DNA, 21 bp, Homo sapiens
accgattaaattcattagtgt

SEQ ID NO: 12309 - DNA, 21 bp, Homo sapiens
caggtgatagttggcatctat

SEQ ID NO: 12310 - DNA, 21 bp, Homo sapiens
cagcttgagggtctaaggata

SEQ ID NO: 12311 - DNA, 21 bp, Homo sapiens
cacgaagtagaggaactcata

SEQ ID NO: 12312 - DNA, 21 bp, Homo sapiens
ccctaggtgtctggaaatgaa

SEQ ID NO: 12313 - DNA, 21 bp, Homo sapiens
aagggattatctagcattaaa

SEQ ID NO: 12314 - DNA, 21 bp, Homo sapiens
caggatggagacagtgatgaa

SEQ ID NO: 12315 - DNA, 21 bp, Homo sapiens
aagcttaggctgttaaataaa

SEQ ID NO: 12316 - DNA, 21 bp, Homo sapiens
caagagcatatttgcaaccaa

SEQ ID NO: 12317 - DNA, 21 bp, Homo sapiens
tcgctctccttcactaaatta

SEQ ID NO: 12318 - DNA, 21 bp, Homo sapiens
atcacagttactattgataaa

SEQ ID NO: 12319 - DNA, 21 bp, Homo sapiens
ttgaatgattccggcttgtaa

SEQ ID NO: 12320 - DNA, 21 bp, Homo sapiens
acgttatttattatgatccta

SEQ ID NO: 12321 - DNA, 21 bp, Homo sapiens
cagcacagatctgattctgaa

SEQ ID NO: 12322 - DNA, 21 bp, Homo sapiens
cctgcagcacatgaaattcaa

SEQ ID NO: 12323 - DNA, 21 bp, Homo sapiens
ccgcgcggctttggcaagaaa

SEQ ID NO: 12324 - DNA, 21 bp, Homo sapiens
cagccagtttctgttgtttga

SEQ ID NO: 12325 - DNA, 21 bp, Homo sapiens
cagactagaggaattgtacaa

SEQ ID NO: 12326 - DNA, 21 bp, Homo sapiens
acggcctgaaactcttcataa

SEQ ID NO: 12327 - DNA, 21 bp, Homo sapiens
atcatcgtgtatagacatcta

SEQ ID NO: 12328 - DNA, 21 bp, Homo sapiens
caaggtaacagtcatagttca

SEQ ID NO: 12329 - DNA, 21 bp, Homo sapiens
ctagatgatcttgactttcca

SEQ ID NO: 12330 - DNA, 21 bp, Homo sapiens
aagaccttactttgcgattca

SEQ ID NO: 12331 - DNA, 21 bp, Homo sapiens
cacctgggtgtcacacggcaa

SEQ ID NO: 12332 - DNA, 21 bp, Homo sapiens
aagggcttctttgataaagaa

SEQ ID NO: 12333 - DNA, 21 bp, Homo sapiens
ttggaggttggcagaattcta

SEQ ID NO: 12334 - DNA, 21 bp, Homo sapiens
cagcaggtggatgagacacaa

SEQ ID NO: 12335 - DNA, 21 bp, Homo sapiens
cccaacctacaccaacctcaa

SEQ ID NO: 12336 - DNA, 21 bp, Homo sapiens
aaggagttcatcgacctgcta

SEQ ID NO: 12337 - DNA, 21 bp, Homo sapiens
aggctttaaggttgatatcaa

SEQ ID NO: 12338 - DNA, 21 bp, Homo sapiens
ctgtgtgtctgtcctacataa

SEQ ID NO: 12339 - DNA, 21 bp, Homo sapiens
cacaaattccattattgtcaa

SEQ ID NO: 12340 - DNA, 21 bp, Homo sapiens
ccgccacaccttcctccataa

SEQ ID NO: 12341 - DNA, 21 bp, Homo sapiens
aaagataaatacggtcctgaa

SEQ ID NO: 12342 - DNA, 21 bp, Homo sapiens
ttccacttaatttcactatta

SEQ ID NO: 12343 - DNA, 21 bp, Homo sapiens
ctgagcttaattgtacattaa

SEQ ID NO: 12344 - DNA, 21 bp, Homo sapiens
caccacaaagtcagtactcaa

SEQ ID NO: 12345 - DNA, 21 bp, Homo sapiens
caggtccaccatggccatcta

SEQ ID NO: 12346 - DNA, 21 bp, Homo sapiens
ttgtaaatgatgagaaataaa

SEQ ID NO: 12347 - DNA, 21 bp, Homo sapiens
aaagaaatatttagtaaatta

SEQ ID NO: 12348 - DNA, 21 bp, Homo sapiens
ctggcctaggaccttaaatat

SEQ ID NO: 12349 - DNA, 21 bp, Homo sapiens
atgggctaattagaattatca

SEQ ID NO: 12350 - DNA, 21 bp, Homo sapiens
aaagcatatgaaagaattcaa

SEQ ID NO: 12351 - DNA, 21 bp, Homo sapiens
gtggtacatcgcgatatcaaa

SEQ ID NO: 12352 - DNA, 21 bp, Homo sapiens
cgcgatatcaaaggaaataat

SEQ ID NO: 12353 - DNA, 21 bp, Homo sapiens
ctgaccaggtaagaaactgaa

SEQ ID NO: 12354 - DNA, 21 bp, Homo sapiens
atgtctaattggagatttcaa

SEQ ID NO: 12355 - DNA, 21 bp, Homo sapiens
cacaagctgctttcaatttaa

SEQ ID NO: 12356 - DNA, 21 bp, Homo sapiens
caggagtgatgcatccagaaa

SEQ ID NO: 12357 - DNA, 21 bp, Homo sapiens
ccgatccaagatgctttctaa

SEQ ID NO: 12358 - DNA, 21 bp, Homo sapiens
caccaatgaactgaagattaa

SEQ ID NO: 12359 - DNA, 21 bp, Homo sapiens
aagctctagcatgaaattaaa

SEQ ID NO: 12360 - DNA, 21 bp, Homo sapiens
caaccgttcgtgagtcatcaa

SEQ ID NO: 12361 - DNA, 21 bp, Homo sapiens
accggactgtgtatttattta

SEQ ID NO: 12362 - DNA, 21 bp, Homo sapiens
ctgggaatataagtgcattaa

SEQ ID NO: 12363 - DNA, 21 bp, Homo sapiens
cagacaggcatgagacattaa

SEQ ID NO: 12364 - DNA, 21 bp, Homo sapiens
aagcatggaatcagatcctaa

SEQ ID NO: 12365 - DNA, 21 bp, Homo sapiens
tagaatttgctcagttaatta

SEQ ID NO: 12366 - DNA, 21 bp, Homo sapiens
ctggaggaaggtttaaacaaa

SEQ ID NO: 12367 - DNA, 21 bp, Homo sapiens
cacactggaaatcgtgcagaa

SEQ ID NO: 12368 - DNA, 21 bp, Homo sapiens
tgcactgatgataacttcaaa

SEQ ID NO: 12369 - DNA, 21 bp, Homo sapiens
caagtgaatattgaaccttaa

SEQ ID NO: 12370 - DNA, 21 bp, Homo sapiens
atggatgaatgtactcatgta

SEQ ID NO: 12371 - DNA, 21 bp, Homo sapiens
ccggaagaaatgaagaattaa

SEQ ID NO: 12372 - DNA, 21 bp, Homo sapiens
aacgatcattatcaacttcaa

SEQ ID NO: 12373 - DNA, 21 bp, Homo sapiens
ctgctctgtgccttaacttat

SEQ ID NO: 12374 - DNA, 21 bp, Homo sapiens
cagcattgatgatgccttcga

SEQ ID NO: 12375 - DNA, 21 bp, Homo sapiens
tagaggaggtgcagtaattta

SEQ ID NO: 12376 - DNA, 21 bp, Homo sapiens
ccagttgttacttaagaaaga

SEQ ID NO: 12377 - DNA, 21 bp, Homo sapiens
accctgaaagattatgaacta

SEQ ID NO: 12378 - DNA, 21 bp, Homo sapiens
aaccatagagttaggcatcat

SEQ ID NO: 12379 - DNA, 21 bp, Homo sapiens
cctgatcagtgttaaccttta

SEQ ID NO: 12380 - DNA, 21 bp, Homo sapiens
ctgaatcaatgtgttattgtt

SEQ ID NO: 12381 - DNA, 21 bp, Homo sapiens
cacctgggaaagcgccttcaa

SEQ ID NO: 12382 - DNA, 21 bp, Homo sapiens
acggtgcaagagaatacttga

SEQ ID NO: 12383 - DNA, 21 bp, Homo sapiens
aaggaagacctagccgcataa

SEQ ID NO: 12384 - DNA, 21 bp, Homo sapiens
tacaagtaagacttaggataa

SEQ ID NO: 12385 - DNA, 21 bp, Homo sapiens
ccagatagaattcatcatcaa

SEQ ID NO: 12386 - DNA, 21 bp, Homo sapiens
tcggatcttcttggccatgaa

SEQ ID NO: 12387 - DNA, 21 bp, Homo sapiens
ctcagcttcagtcatgtgtaa

SEQ ID NO: 12388 - DNA, 21 bp, Homo sapiens
tcgggcggtgaaagtactgaa

SEQ ID NO: 12389 - DNA, 21 bp, Homo sapiens
ctgaactatgctaatctggaa

SEQ ID NO: 12390 - DNA, 21 bp, Homo sapiens
cagaatgtttatgtctagtta

SEQ ID NO: 12391 - DNA, 21 bp, Homo sapiens
cacccaattcatcgtaatcat

SEQ ID NO: 12392 - DNA, 21 bp, Homo sapiens
ccgcaggtggttattcgccaa

SEQ ID NO: 12393 - DNA, 21 bp, Homo sapiens
caggccctacatttaaagcta

SEQ ID NO: 12394 - DNA, 21 bp, Homo sapiens
cagcccttggtcctatctgaa

SEQ ID NO: 12395 - DNA, 21 bp, Homo sapiens
aaggaccaaattgaaaggcaa

SEQ ID NO: 12396 - DNA, 21 bp, Homo sapiens
cagactgaagttgaaagatta

SEQ ID NO: 12397 - DNA, 21 bp, Homo sapiens
caggccgaacaggtccttaaa

SEQ ID NO: 12398 - DNA, 21 bp, Homo sapiens
tcgccagttgttcaaggataa

SEQ ID NO: 12399 - DNA, 21 bp, Homo sapiens
acagaaggaaacgataagcaa

SEQ ID NO: 12400 - DNA, 21 bp, Homo sapiens
agggcttaatgtagttaataa

SEQ ID NO: 12401 - DNA, 21 bp, Homo sapiens
caggttaatgattacaattaa

SEQ ID NO: 12402 - DNA, 21 bp, Homo sapiens
cacagagttcggaattcacaa

SEQ ID NO: 12403 - DNA, 21 bp, Homo sapiens
taggagcagaacgctcatgaa

SEQ ID NO: 12404 - DNA, 21 bp, Homo sapiens
aagcctcaacgaggccatgaa

SEQ ID NO: 12405 - DNA, 21 bp, Homo sapiens
caagctctggatccagttcaa

SEQ ID NO: 12406 - DNA, 21 bp, Homo sapiens
caggtgctacaggacagcaaa

SEQ ID NO: 12407 - DNA, 21 bp, Homo sapiens
cacgtgtggttgccaccagaa

SEQ ID NO: 12408 - DNA, 21 bp, Homo sapiens
cccggctttgaccttgcccaa

SEQ ID NO: 12409 - DNA, 21 bp, Homo sapiens
caccaacatgttaattcatga

SEQ ID NO: 12410 - DNA, 21 bp, Homo sapiens
aagaagatgagtcatattgta

SEQ ID NO: 12411 - DNA, 21 bp, Homo sapiens
ggcaagtatgctacaaattta

SEQ ID NO: 12412 - DNA, 21 bp, Homo sapiens
ctgaaattctggacaccttaa

SEQ ID NO: 12413 - DNA, 21 bp, Homo sapiens
ctccggtacaatagaattaaa

SEQ ID NO: 12414 - DNA, 21 bp, Homo sapiens
ctgctttctgatagtgatcaa

SEQ ID NO: 12415 - DNA, 21 bp, Homo sapiens
ctgcaagttgatgaatcacaa

SEQ ID NO: 12416 - DNA, 21 bp, Homo sapiens
tagctccctaatggtctataa

SEQ ID NO: 12417 - DNA, 21 bp, Homo sapiens
catgctgtttgtaacgctcaa

SEQ ID NO: 12418 - DNA, 21 bp, Homo sapiens
aacgctcaacatgatcttcca

SEQ ID NO: 12419 - DNA, 21 bp, Homo sapiens
aacctgtatatgtaccttgta

SEQ ID NO: 12420 - DNA, 21 bp, Homo sapiens
accctacaattaaacactgta

SEQ ID NO: 12421 - DNA, 21 bp, Homo sapiens
tatgatgataattgtataata

SEQ ID NO: 12422 - DNA, 21 bp, Homo sapiens
tcgggatatacccacaggaaa

SEQ ID NO: 12423 - DNA, 21 bp, Homo sapiens
ctgcacattgggagccttata

SEQ ID NO: 12424 - DNA, 21 bp, Homo sapiens
ctggtgcagaagcacattaaa

SEQ ID NO: 12425 - DNA, 21 bp, Homo sapiens
caggcgaatttctcatttcaa

SEQ ID NO: 12426 - DNA, 21 bp, Homo sapiens
accatacttagtcatcaccaa

SEQ ID NO: 12427 - DNA, 21 bp, Homo sapiens
acccaggacctacaagatcaa

SEQ ID NO: 12428 - DNA, 21 bp, Homo sapiens
caggacctacaagatcaacta

SEQ ID NO: 12429 - DNA, 21 bp, Homo sapiens
tagcagggacttacagatgaa

SEQ ID NO: 12430 - DNA, 21 bp, Homo sapiens
cagacttggcaccaacattaa

SEQ ID NO: 12431 - DNA, 21 bp, Homo sapiens
aacgaaatcaaacaatattta

SEQ ID NO: 12432 - DNA, 21 bp, Homo sapiens
caggattactacaaagcatta

SEQ ID NO: 12433 - DNA, 21 bp, Homo sapiens
tcggttccgtgcaactttcaa

SEQ ID NO: 12434 - DNA, 21 bp, Homo sapiens
cgcgtacatcgtgcaggccaa

SEQ ID NO: 12435 - DNA, 21 bp, Homo sapiens
ccctttctactatgagatcaa

SEQ ID NO: 12436 - DNA, 21 bp, Homo sapiens
cagggatgcacccacaatgta

SEQ ID NO: 12437 - DNA, 21 bp, Homo sapiens
ccgggtgtttgggaataagaa

SEQ ID NO: 12438 - DNA, 21 bp, Homo sapiens
tccgattatgggataggagaa

SEQ ID NO: 12439 - DNA, 21 bp, Homo sapiens
aagaagatgatggacaagaaa

SEQ ID NO: 12440 - DNA, 21 bp, Homo sapiens
ctggcagctgacagataccaa

SEQ ID NO: 12441 - DNA, 21 bp, Homo sapiens
ctgaaacactctgacagcaaa

SEQ ID NO: 12442 - DNA, 21 bp, Homo sapiens
cagcatgaccctggagcccaa

SEQ ID NO: 12443 - DNA, 21 bp, Homo sapiens
caggactaccaggaaatacta

SEQ ID NO: 12444 - DNA, 21 bp, Homo sapiens
ctgattattattgtctcatta

SEQ ID NO: 12445 - DNA, 21 bp, Homo sapiens
ccgcagtattatcaagatcta

SEQ ID NO: 12446 - DNA, 21 bp, Homo sapiens
ctggcccagatccgaaggcaa

SEQ ID NO: 12447 - DNA, 21 bp, Homo sapiens
cccggacaacaagaagaggaa

SEQ ID NO: 12448 - DNA, 21 bp, Homo sapiens
ccgggtcatcttggagtatat

SEQ ID NO: 12449 - DNA, 21 bp, Homo sapiens
caggacagcaatgcctgacaa

SEQ ID NO: 12450 - DNA, 21 bp, Homo sapiens
taagctgggtctgacatataa

SEQ ID NO: 12451 - DNA, 21 bp, Homo sapiens
acccatgacatgtcttataaa

SEQ ID NO: 12452 - DNA, 21 bp, Homo sapiens
aagctggtctcttatcaagaa

SEQ ID NO: 12453 - DNA, 21 bp, Homo sapiens
acggcagttgctgaccatcta

SEQ ID NO: 12454 - DNA, 21 bp, Homo sapiens
ctggctcatgtggaacattat

SEQ ID NO: 12455 - DNA, 21 bp, Homo sapiens
ctccttcattcctaccgtcaa

SEQ ID NO: 12456 - DNA, 21 bp, Homo sapiens
ttggcaaagcaatccaataaa

SEQ ID NO: 12457 - DNA, 21 bp, Homo sapiens
ctccttcatgggcaagcgcta

SEQ ID NO: 12458 - DNA, 21 bp, Homo sapiens
ctggtttctctccctctccaa

SEQ ID NO: 12459 - DNA, 21 bp, Homo sapiens
taggatacaaatgaagcttaa

SEQ ID NO: 12460 - DNA, 21 bp, Homo sapiens
aagtctttaattggtaaataa

SEQ ID NO: 12461 - DNA, 21 bp, Homo sapiens
tcgcggaagtatcgcggctta

SEQ ID NO: 12462 - DNA, 21 bp, Homo sapiens
ccagcggtttctcggaaagta

SEQ ID NO: 12463 - DNA, 21 bp, Homo sapiens
acccagttatatgcagggcta

SEQ ID NO: 12464 - DNA, 21 bp, Homo sapiens
tcagcaggaagtgatctataa

SEQ ID NO: 12465 - DNA, 21 bp, Homo sapiens
ctgggtaatatgcatgaagta

SEQ ID NO: 12466 - DNA, 21 bp, Homo sapiens
cacgcgtacattaatggacat

SEQ ID NO: 12467 - DNA, 21 bp, Homo sapiens
aacccagttgttactctctta

SEQ ID NO: 12468 - DNA, 21 bp, Homo sapiens
caggacaaagtgttaattaca

SEQ ID NO: 12469 - DNA, 21 bp, Homo sapiens
ccggccatttgtggaatacaa

SEQ ID NO: 12470 - DNA, 21 bp, Homo sapiens
aaggttgtagtttacgatcaa

SEQ ID NO: 12471 - DNA, 21 bp, Homo sapiens
gaggaataaattggtctgaaa

SEQ ID NO: 12472 - DNA, 21 bp, Homo sapiens
tgggagaaggttgtaaagaaa

SEQ ID NO: 12473 - DNA, 21 bp, Homo sapiens
ttgctcatatatagtagacaa

SEQ ID NO: 12474 - DNA, 21 bp, Homo sapiens
cagcaattgttcagggaataa

SEQ ID NO: 12475 - DNA, 21 bp, Homo sapiens
cacaatttgcatctcctgtat

SEQ ID NO: 12476 - DNA, 21 bp, Homo sapiens
ggcatttatcacggtactcaa

SEQ ID NO: 12477 - DNA, 21 bp, Homo sapiens
cagcgtgtactctgcggtcta

SEQ ID NO: 12478 - DNA, 21 bp, Homo sapiens
cacactgaagatgaatatgaa

SEQ ID NO: 12479 - DNA, 21 bp, Homo sapiens
cactgtggcgtttaatgacaa

SEQ ID NO: 12480 - DNA, 21 bp, Homo sapiens
ctccgggctgccaataaagaa

SEQ ID NO: 12481 - DNA, 21 bp, Homo sapiens
ctccatgagttctgcctacaa

SEQ ID NO: 12482 - DNA, 21 bp, Homo sapiens
caaggacactgtggcgtttaa

SEQ ID NO: 12483 - DNA, 21 bp, Homo sapiens
cagcacttacaggaccatgta

SEQ ID NO: 12484 - DNA, 21 bp, Homo sapiens
tccctcagagagagtcaggga

SEQ ID NO: 12485 - DNA, 21 bp, Homo sapiens
caacatatgcactgactataa

SEQ ID NO: 12486 - DNA, 21 bp, Homo sapiens
atcctatactcttgtcctgaa

SEQ ID NO: 12487 - DNA, 21 bp, Homo sapiens
cagcagttactcagttgacaa

SEQ ID NO: 12488 - DNA, 21 bp, Homo sapiens
ccagttggcattcactgttaa

SEQ ID NO: 12489 - DNA, 21 bp, Homo sapiens
cccagttctctcacattctta

SEQ ID NO: 12490 - DNA, 21 bp, Homo sapiens
ccgggcaactgcacaattctt

SEQ ID NO: 12491 - DNA, 21 bp, Homo sapiens
atggttagctgtcacatacaa

SEQ ID NO: 12492 - DNA, 21 bp, Homo sapiens
atgagagataaccttgcccta

SEQ ID NO: 12493 - DNA, 21 bp, Homo sapiens
tggctggaatagtaaactaaa

SEQ ID NO: 12494 - DNA, 21 bp, Homo sapiens
acgggtgctggctatgttcaa

SEQ ID NO: 12495 - DNA, 21 bp, Homo sapiens
cacaacattctcagaagataa

SEQ ID NO: 12496 - DNA, 21 bp, Homo sapiens
ccacttgtagttctcatgtaa

SEQ ID NO: 12497 - DNA, 21 bp, Homo sapiens
cagggagataccgagaagtaa

SEQ ID NO: 12498 - DNA, 21 bp, Homo sapiens
cagcaatttgattatgtatta

SEQ ID NO: 12499 - DNA, 21 bp, Homo sapiens
ccgggacttaattaaatacaa

SEQ ID NO: 12500 - DNA, 21 bp, Homo sapiens
atatttgaatattgtgtttaa

SEQ ID NO: 12501 - DNA, 21 bp, Homo sapiens
aagaatttaatcataattcta

SEQ ID NO: 12502 - DNA, 21 bp, Homo sapiens
aagggaaatttgaatatccta

SEQ ID NO: 12503 - DNA, 21 bp, Homo sapiens
caacctcctgctgtccatgta

SEQ ID NO: 12504 - DNA, 21 bp, Homo sapiens
atgcttcagacatgcctgaaa

SEQ ID NO: 12505 - DNA, 21 bp, Homo sapiens
ccgggacgtcagcatcatgaa

SEQ ID NO: 12506 - DNA, 21 bp, Homo sapiens
caggcctgcctccatgcttaa

SEQ ID NO: 12507 - DNA, 21 bp, Homo sapiens
cacctagacattgagaatgaa

SEQ ID NO: 12508 - DNA, 21 bp, Homo sapiens
aacaacatctataacgataaa

SEQ ID NO: 12509 - DNA, 21 bp, Homo sapiens
ctggtgttaagggtcacgcaa

SEQ ID NO: 12510 - DNA, 21 bp, Homo sapiens
cacaggagccggaaagataaa

SEQ ID NO: 12511 - DNA, 21 bp, Homo sapiens
aaggatgtcatcagagaatat

SEQ ID NO: 12512 - DNA, 21 bp, Homo sapiens
ccagatgttagtcaccagtaa

SEQ ID NO: 12513 - DNA, 21 bp, Homo sapiens
cacgttctttatgaaaggcaa

SEQ ID NO: 12514 - DNA, 21 bp, Homo sapiens
ccacgtgtatctgaacattaa

SEQ ID NO: 12515 - DNA, 21 bp, Homo sapiens
caggctgaacaaagaaataga

SEQ ID NO: 12516 - DNA, 21 bp, Homo sapiens
aagactttgaacaaaggctaa

SEQ ID NO: 12517 - DNA, 21 bp, Homo sapiens
ctccatcttgatgatatataa

SEQ ID NO: 12518 - DNA, 21 bp, Homo sapiens
ctgcgtagtgctgaacattaa

SEQ ID NO: 12519 - DNA, 21 bp, Homo sapiens
ctgagaaatgttaataaataa

SEQ ID NO: 12520 - DNA, 21 bp, Homo sapiens
cacagtgacactcaacttcaa

SEQ ID NO: 12521 - DNA, 21 bp, Homo sapiens
ctgctttgaatcctttacgaa

SEQ ID NO: 12522 - DNA, 21 bp, Homo sapiens
ctgcttgacctttacctccaa

SEQ ID NO: 12523 - DNA, 21 bp, Homo sapiens
ccctgatagtctcaaggacaa

SEQ ID NO: 12524 - DNA, 21 bp, Homo sapiens
cagagcagtattaatgatgca

SEQ ID NO: 12525 - DNA, 21 bp, Homo sapiens
acctgtaaatcttaacatcaa

SEQ ID NO: 12526 - DNA, 21 bp, Homo sapiens
cagggaagaactggaaactca

SEQ ID NO: 12527 - DNA, 21 bp, Homo sapiens
ctgagagatcccagaaggtaa

SEQ ID NO: 12528 - DNA, 21 bp, Homo sapiens
gccaatgtctttggactgtaa

SEQ ID NO: 12529 - DNA, 21 bp, Homo sapiens
ccgggccagaagataaagaaa

SEQ ID NO: 12530 - DNA, 21 bp, Homo sapiens
cacctggtggattcacattaa

SEQ ID NO: 12531 - DNA, 21 bp, Homo sapiens
ctgcccgacatcgacagcaaa

SEQ ID NO: 12532 - DNA, 21 bp, Homo sapiens
caccaggatggcgcagaagta

SEQ ID NO: 12533 - DNA, 21 bp, Homo sapiens
cgcatttgacctggagcggta

SEQ ID NO: 12534 - DNA, 21 bp, Homo sapiens
ccaggtggtgctggtggagaa

SEQ ID NO: 12535 - DNA, 21 bp, Homo sapiens
cagccacagttacttcgtcaa

SEQ ID NO: 12536 - DNA, 21 bp, Homo sapiens
cagggtggccttactcagtaa

SEQ ID NO: 12537 - DNA, 21 bp, Homo sapiens
ccgcagaagaagagtgtatga

SEQ ID NO: 12538 - DNA, 21 bp, Homo sapiens
aacccttaatttgaagaacta

SEQ ID NO: 12539 - DNA, 21 bp, Homo sapiens
taaagttgtatgaacccttaa

SEQ ID NO: 12540 - DNA, 21 bp, Homo sapiens
aagagctgctttctcggataa

SEQ ID NO: 12541 - DNA, 21 bp, Homo sapiens
cagggctgtaccctggactga

SEQ ID NO: 12542 - DNA, 21 bp, Homo sapiens
ctgccaggccctagaccaaga

SEQ ID NO: 12543 - DNA, 21 bp, Homo sapiens
cccggagtgatctatgatgtt

SEQ ID NO: 12544 - DNA, 21 bp, Homo sapiens
ccagtggaacgggaactataa

SEQ ID NO: 12545 - DNA, 21 bp, Homo sapiens
ccggagagttctgaaaccaaa

SEQ ID NO: 12546 - DNA, 21 bp, Homo sapiens
caggaaagacggcaaaccgta

SEQ ID NO: 12547 - DNA, 21 bp, Homo sapiens
cgggcacacattcggcatgaa

SEQ ID NO: 12548 - DNA, 21 bp, Homo sapiens
caggactttgtgtacccgaca

SEQ ID NO: 12549 - DNA, 21 bp, Homo sapiens
accgattaatgcatctctcat

SEQ ID NO: 12550 - DNA, 21 bp, Homo sapiens
ccggaagttatttattgggaa

SEQ ID NO: 12551 - DNA, 21 bp, Homo sapiens
ccggataatggccatcatgta

SEQ ID NO: 12552 - DNA, 21 bp, Homo sapiens
tacattactgtccctgcatta

SEQ ID NO: 12553 - DNA, 21 bp, Homo sapiens
cccaaataaccaaacgcgtaa

SEQ ID NO: 12554 - DNA, 21 bp, Homo sapiens
cacaatcaagctaaacctaca

SEQ ID NO: 12555 - DNA, 21 bp, Homo sapiens
ctggataataatgaaatagta

SEQ ID NO: 12556 - DNA, 21 bp, Homo sapiens
atgaatgatgtttgaatgata

SEQ ID NO: 12557 - DNA, 21 bp, Homo sapiens
ttggctaagattaagtattaa

SEQ ID NO: 12558 - DNA, 21 bp, Homo sapiens
cagcgacttcctggcctgtaa

SEQ ID NO: 12559 - DNA, 21 bp, Homo sapiens
caggagggcctggaaccctca

SEQ ID NO: 12560 - DNA, 21 bp, Homo sapiens
cccggaagcctccacactcaa

SEQ ID NO: 12561 - DNA, 21 bp, Homo sapiens
caggctgcaggtcacacttga

SEQ ID NO: 12562 - DNA, 21 bp, Homo sapiens
aggctgcaggtcacacttgaa

SEQ ID NO: 12563 - DNA, 21 bp, Homo sapiens
cagggcatactgggaaatgta

SEQ ID NO: 12564 - DNA, 21 bp, Homo sapiens
cagacttaatacccattgaaa

SEQ ID NO: 12565 - DNA, 21 bp, Homo sapiens
cacatgaagagaagtattcaa

SEQ ID NO: 12566 - DNA, 21 bp, Homo sapiens
atccgtctacagtaaccttaa

SEQ ID NO: 12567 - DNA, 21 bp, Homo sapiens
caggtggaactaatctggtta

SEQ ID NO: 12568 - DNA, 21 bp, Homo sapiens
caggaggacttggactctaca

SEQ ID NO: 12569 - DNA, 21 bp, Homo sapiens
atcgctgaacagctttataaa

SEQ ID NO: 12570 - DNA, 21 bp, Homo sapiens
cagtgttattacctccagtaa

SEQ ID NO: 12571 - DNA, 21 bp, Homo sapiens
caggagattatttcacctcaa

SEQ ID NO: 12572 - DNA, 21 bp, Homo sapiens
caggcagatgataatgatgaa

SEQ ID NO: 12573 - DNA, 21 bp, Homo sapiens
cagcagtggtcgcatcacata

SEQ ID NO: 12574 - DNA, 21 bp, Homo sapiens
ctcgcgcatgatcctgcgcaa

SEQ ID NO: 12575 - DNA, 21 bp, Homo sapiens
cacgaaggacatctctgtcta

SEQ ID NO: 12576 - DNA, 21 bp, Homo sapiens
ccgggagaagtggcttcgtaa

SEQ ID NO: 12577 - DNA, 21 bp, Homo sapiens
ctgggtctttcttctcagcaa

SEQ ID NO: 12578 - DNA, 21 bp, Homo sapiens
atcgataattccacagtcaaa

SEQ ID NO: 12579 - DNA, 21 bp, Homo sapiens
aagagcagtgttaggagttaa

SEQ ID NO: 12580 - DNA, 21 bp, Homo sapiens
caggatggtgctggagttcaa

SEQ ID NO: 12581 - DNA, 21 bp, Homo sapiens
ccagaagaaactaatgcacaa

SEQ ID NO: 12582 - DNA, 21 bp, Homo sapiens
ccggctgataaggaagatgtt

SEQ ID NO: 12583 - DNA, 21 bp, Homo sapiens
caggatgatctcattcaagaa

SEQ ID NO: 12584 - DNA, 21 bp, Homo sapiens
aagggtgatcattcaaaggta

SEQ ID NO: 12585 - DNA, 21 bp, Homo sapiens
cccgatggtcctcaaagggaa

SEQ ID NO: 12586 - DNA, 21 bp, Homo sapiens
ctgagagaaataaactttaaa

SEQ ID NO: 12587 - DNA, 21 bp, Homo sapiens
aaggtcaaactaggccttaaa

SEQ ID NO: 12588 - DNA, 21 bp, Homo sapiens
caggcccattattgactttga

SEQ ID NO: 12589 - DNA, 21 bp, Homo sapiens
tcgaataataatgacacatat

SEQ ID NO: 12590 - DNA, 21 bp, Homo sapiens
cccggctttctcccagcaata

SEQ ID NO: 12591 - DNA, 21 bp, Homo sapiens
cagaatctatgtagaagataa

SEQ ID NO: 12592 - DNA, 21 bp, Homo sapiens
aaggcattatgtgatttacaa

SEQ ID NO: 12593 - DNA, 21 bp, Homo sapiens
tccctctaggtcactgagaaa

SEQ ID NO: 12594 - DNA, 21 bp, Homo sapiens
aaggctggttgtggcctacaa

SEQ ID NO: 12595 - DNA, 21 bp, Homo sapiens
tgcggtttaaagatccctcta

SEQ ID NO: 12596 - DNA, 21 bp, Homo sapiens
aacggtggaggtgccgaccta

SEQ ID NO: 12597 - DNA, 21 bp, Homo sapiens
cagggagtttgtggtcagcga

SEQ ID NO: 12598 - DNA, 21 bp, Homo sapiens
cggacacagcatagaactaca

SEQ ID NO: 12599 - DNA, 21 bp, Homo sapiens
cagcatagaactacagttcca

SEQ ID NO: 12600 - DNA, 21 bp, Homo sapiens
ctgctccttcctgtcccttta

SEQ ID NO: 12601 - DNA, 21 bp, Homo sapiens
ccgcactccaatgaggtcaca

SEQ ID NO: 12602 - DNA, 21 bp, Homo sapiens
caggagagttccagggaagaa

SEQ ID NO: 12603 - DNA, 21 bp, Homo sapiens
ctccttgaataactgcgtaaa

SEQ ID NO: 12604 - DNA, 21 bp, Homo sapiens
ccaagtgatagggaacctcaa

SEQ ID NO: 12605 - DNA, 21 bp, Homo sapiens
cagatgttgtatgcagccaaa

SEQ ID NO: 12606 - DNA, 21 bp, Homo sapiens
ctgcatgatcgtgatgtcaca

SEQ ID NO: 12607 - DNA, 21 bp, Homo sapiens
ctggtggatttacatattaaa

SEQ ID NO: 12608 - DNA, 21 bp, Homo sapiens
ctgctggtggataaacattaa

SEQ ID NO: 12609 - DNA, 21 bp, Homo sapiens
ccggatgacctttgtaagtta

SEQ ID NO: 12610 - DNA, 21 bp, Homo sapiens
cagactcaggtcataaatcaa

SEQ ID NO: 12611 - DNA, 21 bp, Homo sapiens
ccagcgaaagttcaaggccaa

SEQ ID NO: 12612 - DNA, 21 bp, Homo sapiens
cggccagaagttctgcattaa

SEQ ID NO: 12613 - DNA, 21 bp, Homo sapiens
aaggaggaggatccaacaata

SEQ ID NO: 12614 - DNA, 21 bp, Homo sapiens
ctggccatccatcctactcaa

SEQ ID NO: 12615 - DNA, 21 bp, Homo sapiens
aagggttagggtgatggtcca

SEQ ID NO: 12616 - DNA, 21 bp, Homo sapiens
tggcttatactttcttaataa

SEQ ID NO: 12617 - DNA, 21 bp, Homo sapiens
agggctgttgaggtaccttaa

SEQ ID NO: 12618 - DNA, 21 bp, Homo sapiens
tagggtgatggtccagagcaa

SEQ ID NO: 12619 - DNA, 21 bp, Homo sapiens
cccactgtttgccaaccttaa

SEQ ID NO: 12620 - DNA, 21 bp, Homo sapiens
cagcacctagtttgagaccaa

SEQ ID NO: 12621 - DNA, 21 bp, Homo sapiens
tcccaggagtttccagggtaa

SEQ ID NO: 12622 - DNA, 21 bp, Homo sapiens
gcggatctcattaggcggaaa

SEQ ID NO: 12623 - DNA, 21 bp, Homo sapiens
tacctataatatagaaatcaa

SEQ ID NO: 12624 - DNA, 21 bp, Homo sapiens
aaagatttgtatgaagataaa

SEQ ID NO: 12625 - DNA, 21 bp, Homo sapiens
gcggcgcttcctccaatccaa

SEQ ID NO: 12626 - DNA, 21 bp, Homo sapiens
cagccgcatgctaggacccaa

SEQ ID NO: 12627 - DNA, 21 bp, Homo sapiens
ctgcctggcctcatccttgta

SEQ ID NO: 12628 - DNA, 21 bp, Homo sapiens
ttgtatttaattaattaaaca

SEQ ID NO: 12629 - DNA, 21 bp, Homo sapiens
tggcctcatccttgtatttaa

SEQ ID NO: 12630 - DNA, 21 bp, Homo sapiens
tccttgtatttaattaattaa

SEQ ID NO: 12631 - DNA, 21 bp, Homo sapiens
cagcgtgagtatgaagaacta

SEQ ID NO: 12632 - DNA, 21 bp, Homo sapiens
aaggctatattgtaattctaa

SEQ ID NO: 12633 - DNA, 21 bp, Homo sapiens
ctggtgggtgttccatcacta

SEQ ID NO: 12634 - DNA, 21 bp, Homo sapiens
ctcgccctgaagaaatgcaaa

SEQ ID NO: 12635 - DNA, 21 bp, Homo sapiens
ctgcagattctgaatactcaa

SEQ ID NO: 12636 - DNA, 21 bp, Homo sapiens
ccgcctgacattacatggcat

SEQ ID NO: 12637 - DNA, 21 bp, Homo sapiens
tagactctaagcaattgccaa

SEQ ID NO: 12638 - DNA, 21 bp, Homo sapiens
ccgagtatatgttccgccaaa

SEQ ID NO: 12639 - DNA, 21 bp, Homo sapiens
tggatttatgaggaaactgaa

SEQ ID NO: 12640 - DNA, 21 bp, Homo sapiens
tacccagaactgggactacaa

SEQ ID NO: 12641 - DNA, 21 bp, Homo sapiens
gtgggatagtctcccatttaa

SEQ ID NO: 12642 - DNA, 21 bp, Homo sapiens
cccatttaagcagctaataaa

SEQ ID NO: 12643 - DNA, 21 bp, Homo sapiens
cgggataacaatagtaggtaa

SEQ ID NO: 12644 - DNA, 21 bp, Homo sapiens
atggatggttagaaatgttaa

SEQ ID NO: 12645 - DNA, 21 bp, Homo sapiens
ttggtggtttgttgaccttat

SEQ ID NO: 12646 - DNA, 21 bp, Homo sapiens
atggccgtggattgtaataca

SEQ ID NO: 12647 - DNA, 21 bp, Homo sapiens
cactacttcataaccacttta

SEQ ID NO: 12648 - DNA, 21 bp, Homo sapiens
tggattgtaatacacactgaa

SEQ ID NO: 12649 - DNA, 21 bp, Homo sapiens
cagagtaaagaagaacttaaa

SEQ ID NO: 12650 - DNA, 21 bp, Homo sapiens
cacaataatagtattaactaa

SEQ ID NO: 12651 - DNA, 21 bp, Homo sapiens
tacaatttggtctgtcgtgaa

SEQ ID NO: 12652 - DNA, 21 bp, Homo sapiens
gtcgtgaagggtatccttaaa

SEQ ID NO: 12653 - DNA, 21 bp, Homo sapiens
taccctaaatcttaactttat

SEQ ID NO: 12654 - DNA, 21 bp, Homo sapiens
ccctatgtacctaatctgaaa

SEQ ID NO: 12655 - DNA, 21 bp, Homo sapiens
accagtgcccttcaccaatta

SEQ ID NO: 12656 - DNA, 21 bp, Homo sapiens
cccaccagactcatttgtaaa

SEQ ID NO: 12657 - DNA, 21 bp, Homo sapiens
aacccaaaaccatcaagaatg

SEQ ID NO: 12658 - DNA, 21 bp, Homo sapiens
aagtgcccttcaccaattaca

SEQ ID NO: 12659 - DNA, 21 bp, Homo sapiens
caggtagaaatcacacttgaa

SEQ ID NO: 12660 - DNA, 21 bp, Homo sapiens
cagaattgctgcagtcactaa

SEQ ID NO: 12661 - DNA, 21 bp, Homo sapiens
ccctggtagcagaaatcctta

SEQ ID NO: 12662 - DNA, 21 bp, Homo sapiens
atcgatgatctttgcaatctt

SEQ ID NO: 12663 - DNA, 21 bp, Homo sapiens
ttcgggcagatgggaagaata

SEQ ID NO: 12664 - DNA, 21 bp, Homo sapiens
caggctcatgaagaaggagaa

SEQ ID NO: 12665 - DNA, 21 bp, Homo sapiens
acagtctgtttaagtaagcta

SEQ ID NO: 12666 - DNA, 21 bp, Homo sapiens
cagtctgtttaagtaagctaa

SEQ ID NO: 12667 - DNA, 21 bp, Homo sapiens
cgggttctgtgtgttcaacaa

SEQ ID NO: 12668 - DNA, 21 bp, Homo sapiens
ccgttagtaaacatcgctcaa

SEQ ID NO: 12669 - DNA, 21 bp, Homo sapiens
cgcccttgcgccgttagtaaa

SEQ ID NO: 12670 - DNA, 21 bp, Homo sapiens
caggtgaacagtggtatagca

SEQ ID NO: 12671 - DNA, 21 bp, Homo sapiens
cagaaagtaaccagacaagaa

SEQ ID NO: 12672 - DNA, 21 bp, Homo sapiens
ttgccttgaaatgaatggaaa

SEQ ID NO: 12673 - DNA, 21 bp, Homo sapiens
acgctacgcaagaaccagtta

SEQ ID NO: 12674 - DNA, 21 bp, Homo sapiens
agcacccaacataacttgtaa

SEQ ID NO: 12675 - DNA, 21 bp, Homo sapiens
aagtagttacattatagatta

SEQ ID NO: 12676 - DNA, 21 bp, Homo sapiens
acgcaattatatccataaata

SEQ ID NO: 12677 - DNA, 21 bp, Homo sapiens
tgggcatggctcaaactcaaa

SEQ ID NO: 12678 - DNA, 21 bp, Homo sapiens
aacgtgtgtctttccacttat

SEQ ID NO: 12679 - DNA, 21 bp, Homo sapiens
aagactgtttatatactacca

SEQ ID NO: 12680 - DNA, 21 bp, Homo sapiens
acgtgtgtctttccacttata

SEQ ID NO: 12681 - DNA, 21 bp, Homo sapiens
aaggaaacgaactccaattta

SEQ ID NO: 12682 - DNA, 21 bp, Homo sapiens
cagatttgggagcaaaggcaa

SEQ ID NO: 12683 - DNA, 21 bp, Homo sapiens
caggtggatgcagacatccaa

SEQ ID NO: 12684 - DNA, 21 bp, Homo sapiens
aaggaaggaaacgaactccaa

SEQ ID NO: 12685 - DNA, 21 bp, Homo sapiens
ccgaaagtacctgaagttaaa

SEQ ID NO: 12686 - DNA, 21 bp, Homo sapiens
ccgggaaatcgagatgagcaa

SEQ ID NO: 12687 - DNA, 21 bp, Homo sapiens
cgcagtcacttcacaaggcaa

SEQ ID NO: 12688 - DNA, 21 bp, Homo sapiens
caagggtaccgtggccatcaa

SEQ ID NO: 12689 - DNA, 21 bp, Homo sapiens
ccggttggaacctgcaataaa

SEQ ID NO: 12690 - DNA, 21 bp, Homo sapiens
atcgaggtgtgcaacgggaaa

SEQ ID NO: 12691 - DNA, 21 bp, Homo sapiens
tagcatggcaacaatctctta

SEQ ID NO: 12692 - DNA, 21 bp, Homo sapiens
caggcccttggtagatgtatt

SEQ ID NO: 12693 - DNA, 21 bp, Homo sapiens
aagataaacagtccacttcaa

SEQ ID NO: 12694 - DNA, 21 bp, Homo sapiens
cctgaactttacgatcctgaa

SEQ ID NO: 12695 - DNA, 21 bp, Homo sapiens
ctcagttgtttcagaaacata

SEQ ID NO: 12696 - DNA, 21 bp, Homo sapiens
cagcaactggaatgactccta

SEQ ID NO: 12697 - DNA, 21 bp, Homo sapiens
ctggaaattacctggagacaa

SEQ ID NO: 12698 - DNA, 21 bp, Homo sapiens
acgggaatgcatctccagcaa

SEQ ID NO: 12699 - DNA, 21 bp, Homo sapiens
acgggtcatgatggaattaaa

SEQ ID NO: 12700 - DNA, 21 bp, Homo sapiens
cacctgaaggacaaagttcaa

SEQ ID NO: 12701 - DNA, 21 bp, Homo sapiens
ccctgtggtattcataaagta

SEQ ID NO: 12702 - DNA, 21 bp, Homo sapiens
cagggccagaattcacattat

SEQ ID NO: 12703 - DNA, 21 bp, Homo sapiens
ctgctggattagaattactta

SEQ ID NO: 12704 - DNA, 21 bp, Homo sapiens
caactggagaattacaagaaa

SEQ ID NO: 12705 - DNA, 21 bp, Homo sapiens
cacccagcaaatgaagctgaa

SEQ ID NO: 12706 - DNA, 21 bp, Homo sapiens
ttggctgtatgcggaattcca

SEQ ID NO: 12707 - DNA, 21 bp, Homo sapiens
ctgagggaaggtgaagcttaa

SEQ ID NO: 12708 - DNA, 21 bp, Homo sapiens
ccagcttgaaatgagagtaaa

SEQ ID NO: 12709 - DNA, 21 bp, Homo sapiens
ttgccagtgtatgacacctta

SEQ ID NO: 12710 - DNA, 21 bp, Homo sapiens
tgccagtgtatgacaccttaa

SEQ ID NO: 12711 - DNA, 21 bp, Homo sapiens
ccggattcacatctatactaa

SEQ ID NO: 12712 - DNA, 21 bp, Homo sapiens
tggatagttctatagaattaa

SEQ ID NO: 12713 - DNA, 21 bp, Homo sapiens
ccggaagaagttcaagtttga

SEQ ID NO: 12714 - DNA, 21 bp, Homo sapiens
ccgaagcctgagtttggtaaa

SEQ ID NO: 12715 - DNA, 21 bp, Homo sapiens
ccgcaagttctcacagcctga

SEQ ID NO: 12716 - DNA, 21 bp, Homo sapiens
ccggagcatcaaagcaaagtt

SEQ ID NO: 12717 - DNA, 21 bp, Homo sapiens
taggagaatttgagaagttta

SEQ ID NO: 12718 - DNA, 21 bp, Homo sapiens
aaagatttccatgaaatgtaa

SEQ ID NO: 12719 - DNA, 21 bp, Homo sapiens
atgcttattctgtacagtaaa

SEQ ID NO: 12720 - DNA, 21 bp, Homo sapiens
ttgttattgcatagtaaataa

SEQ ID NO: 12721 - DNA, 21 bp, Homo sapiens
atggaaattcaggaattacaa

SEQ ID NO: 12722 - DNA, 21 bp, Homo sapiens
aggaattacaatgatgcggaa

SEQ ID NO: 12723 - DNA, 21 bp, Homo sapiens
cagcccgtgatgaatggcaaa

SEQ ID NO: 12724 - DNA, 21 bp, Homo sapiens
caggacgaggcgaaagcccaa

SEQ ID NO: 12725 - DNA, 21 bp, Homo sapiens
ttggaggatacctaagatcta

SEQ ID NO: 12726 - DNA, 21 bp, Homo sapiens
cacgacagaactgcacttgta

SEQ ID NO: 12727 - DNA, 21 bp, Homo sapiens
ctgagtctcacctgcagtcta

SEQ ID NO: 12728 - DNA, 21 bp, Homo sapiens
cagggatttgcccttcacaat

SEQ ID NO: 12729 - DNA, 21 bp, Homo sapiens
cagcttgtttgaagcccttga

SEQ ID NO: 12730 - DNA, 21 bp, Homo sapiens
ataaatctttgtaaataacaa

SEQ ID NO: 12731 - DNA, 21 bp, Homo sapiens
aaggatgcagcttgactttaa

SEQ ID NO: 12732 - DNA, 21 bp, Homo sapiens
caggtgtggagtatagatgaa

SEQ ID NO: 12733 - DNA, 21 bp, Homo sapiens
ctcgaagagattcactttcaa

SEQ ID NO: 12734 - DNA, 21 bp, Homo sapiens
cacctcttaagcgaatggaaa

SEQ ID NO: 12735 - DNA, 21 bp, Homo sapiens
cagcagtgtttgataccgtat

SEQ ID NO: 12736 - DNA, 21 bp, Homo sapiens
ctcccattatagggcaaacaa

SEQ ID NO: 12737 - DNA, 21 bp, Homo sapiens
ctgacagaagacagagaacaa

SEQ ID NO: 12738 - DNA, 21 bp, Homo sapiens
ccgaggaacaaccttaatgaa

SEQ ID NO: 12739 - DNA, 21 bp, Homo sapiens
ccgggtggaagtgctcatgaa

SEQ ID NO: 12740 - DNA, 21 bp, Homo sapiens
cagagtcagatttctccaaca

SEQ ID NO: 12741 - DNA, 21 bp, Homo sapiens
caggattggtctaaacttcaa

SEQ ID NO: 12742 - DNA, 21 bp, Homo sapiens
ctcattatggactgctacaaa

SEQ ID NO: 12743 - DNA, 21 bp, Homo sapiens
ctcgttgagaccaccaccata

SEQ ID NO: 12744 - DNA, 21 bp, Homo sapiens
tcggacagtctaggtcctcaa

SEQ ID NO: 12745 - DNA, 21 bp, Homo sapiens
catcaacaggttctcaattaa

SEQ ID NO: 12746 - DNA, 21 bp, Homo sapiens
caggttctcaattaaagattt

SEQ ID NO: 12747 - DNA, 21 bp, Homo sapiens
cagggaattgagcttcagcaa

SEQ ID NO: 12748 - DNA, 21 bp, Homo sapiens
acagatttcctaaacaagtaa

SEQ ID NO: 12749 - DNA, 21 bp, Homo sapiens
cacagtctggtgaatggtata

SEQ ID NO: 12750 - DNA, 21 bp, Homo sapiens
atggctgagatgcgtaagcaa

SEQ ID NO: 12751 - DNA, 21 bp, Homo sapiens
ccgaagtatgcgacatagaaa

SEQ ID NO: 12752 - DNA, 21 bp, Homo sapiens
accagatgcgttggtccataa

SEQ ID NO: 12753 - DNA, 21 bp, Homo sapiens
aacactatgcttactgaatat

SEQ ID NO: 12754 - DNA, 21 bp, Homo sapiens
acgggtcatgtgcgactccaa

SEQ ID NO: 12755 - DNA, 21 bp, Homo sapiens
cacgatgatctcatgccctca

SEQ ID NO: 12756 - DNA, 21 bp, Homo sapiens
aaggtcttggatacacttaga

SEQ ID NO: 12757 - DNA, 21 bp, Homo sapiens
tagcttctcatgtgtaaacta

SEQ ID NO: 12758 - DNA, 21 bp, Homo sapiens
caccttgaagctctcaaatat

SEQ ID NO: 12759 - DNA, 21 bp, Homo sapiens
agcagtcattgcagaattaaa

SEQ ID NO: 12760 - DNA, 21 bp, Homo sapiens
cagaattaaagtaaacatgta

SEQ ID NO: 12761 - DNA, 21 bp, Homo sapiens
cagcatattaagggaatataa

SEQ ID NO: 12762 - DNA, 21 bp, Homo sapiens
cagcttgatgtccatgagcaa

SEQ ID NO: 12763 - DNA, 21 bp, Homo sapiens
cagcatgaaataaacactcta

SEQ ID NO: 12764 - DNA, 21 bp, Homo sapiens
caggcgttcagtggaattaaa

SEQ ID NO: 12765 - DNA, 21 bp, Homo sapiens
cagcatggtaataatgttcaa

SEQ ID NO: 12766 - DNA, 21 bp, Homo sapiens
cagaattatgataataagcaa

SEQ ID NO: 12767 - DNA, 21 bp, Homo sapiens
caggacaatgacagagtacta

SEQ ID NO: 12768 - DNA, 21 bp, Homo sapiens
cacactgaccatctccatcta

SEQ ID NO: 12769 - DNA, 21 bp, Homo sapiens
aaggagtgcgagcacatcaaa

SEQ ID NO: 12770 - DNA, 21 bp, Homo sapiens
tcggagaagatcgaccagcta

SEQ ID NO: 12771 - DNA, 21 bp, Homo sapiens
gcgggacgcatccatgttaaa

SEQ ID NO: 12772 - DNA, 21 bp, Homo sapiens
cacgctggtctcctcacacaa

SEQ ID NO: 12773 - DNA, 21 bp, Homo sapiens
caggtgatttggattgtgaaa

SEQ ID NO: 12774 - DNA, 21 bp, Homo sapiens
atcggtttatgttggattaaa

SEQ ID NO: 12775 - DNA, 21 bp, Homo sapiens
aacatttatttcagaacaata

SEQ ID NO: 12776 - DNA, 21 bp, Homo sapiens
tcccacgtgtatacaagctaa

SEQ ID NO: 12777 - DNA, 21 bp, Homo sapiens
aggcacctaccttgcatctaa

SEQ ID NO: 12778 - DNA, 21 bp, Homo sapiens
aaagaggtgacttaagttcaa

SEQ ID NO: 12779 - DNA, 21 bp, Homo sapiens
acccagttcatgaatcgctaa

SEQ ID NO: 12780 - DNA, 21 bp, Homo sapiens
cagttcatgaatcgctaataa

SEQ ID NO: 12781 - DNA, 21 bp, Homo sapiens
aagggagaaaggagaattgaa

SEQ ID NO: 12782 - DNA, 21 bp, Homo sapiens
atagaggatgatgacagttta

SEQ ID NO: 12783 - DNA, 21 bp, Homo sapiens
cgggactctgagggaagtcaa

SEQ ID NO: 12784 - DNA, 21 bp, Homo sapiens
caggcgggaggtggcgcccaa

SEQ ID NO: 12785 - DNA, 21 bp, Homo sapiens
caggatcatcctccagctgaa

SEQ ID NO: 12786 - DNA, 21 bp, Homo sapiens
caaggtgctgaccatattaaa

SEQ ID NO: 12787 - DNA, 21 bp, Homo sapiens
catgattatttgtactttcaa

SEQ ID NO: 12788 - DNA, 21 bp, Homo sapiens
ctggctagaacccgaaacaaa

SEQ ID NO: 12789 - DNA, 21 bp, Homo sapiens
aaagatttcttgtttatttaa

SEQ ID NO: 12790 - DNA, 21 bp, Homo sapiens
aaagatcaaattagccttaat

SEQ ID NO: 12791 - DNA, 21 bp, Homo sapiens
aaagatgatcgtaacacttta

SEQ ID NO: 12792 - DNA, 21 bp, Homo sapiens
aacgagtagcagtgtaatgaa

SEQ ID NO: 12793 - DNA, 21 bp, Homo sapiens
ctgcgtggaccttaccacgaa

SEQ ID NO: 12794 - DNA, 21 bp, Homo sapiens
ccggatccgaggagcaagtta

SEQ ID NO: 12795 - DNA, 21 bp, Homo sapiens
aaccgtgagggatgttaatta

SEQ ID NO: 12796 - DNA, 21 bp, Homo sapiens
accgtgagggatgttaattat

SEQ ID NO: 12797 - DNA, 21 bp, Homo sapiens
cagacactatgcccaagccta

SEQ ID NO: 12798 - DNA, 21 bp, Homo sapiens
cagctccaactagatccagaa

SEQ ID NO: 12799 - DNA, 21 bp, Homo sapiens
ctggaggccggtttatctcaa

SEQ ID NO: 12800 - DNA, 21 bp, Homo sapiens
tccggagttaccggagcggaa

SEQ ID NO: 12801 - DNA, 21 bp, Homo sapiens
ccggctctattgattccagta

SEQ ID NO: 12802 - DNA, 21 bp, Homo sapiens
acgatttaatgtggatggcaa

SEQ ID NO: 12803 - DNA, 21 bp, Homo sapiens
cagcacttgatccgatacaaa

SEQ ID NO: 12804 - DNA, 21 bp, Homo sapiens
tcgcctcatgaagatagagaa

SEQ ID NO: 12805 - DNA, 21 bp, Homo sapiens
caagctctactgatactttaa

SEQ ID NO: 12806 - DNA, 21 bp, Homo sapiens
atgaaagatgttcaagagata

SEQ ID NO: 12807 - DNA, 21 bp, Homo sapiens
tgcctttgagatagagataaa

SEQ ID NO: 12808 - DNA, 21 bp, Homo sapiens
cccagggtaagtgcccacgaa

SEQ ID NO: 12809 - DNA, 21 bp, Homo sapiens
cagggtttagctggcctgtaa

SEQ ID NO: 12810 - DNA, 21 bp, Homo sapiens
ctgcaggtatttcactgttta

SEQ ID NO: 12811 - DNA, 21 bp, Homo sapiens
cagagcgtggatgctctggaa

SEQ ID NO: 12812 - DNA, 21 bp, Homo sapiens
tggcctcactttccatcataa

SEQ ID NO: 12813 - DNA, 21 bp, Homo sapiens
aagaaataatttatcccttaa

SEQ ID NO: 12814 - DNA, 21 bp, Homo sapiens
cacgcatatcatctctttcaa

SEQ ID NO: 12815 - DNA, 21 bp, Homo sapiens
cacagcattgatattacctca

SEQ ID NO: 12816 - DNA, 21 bp, Homo sapiens
taggtagtactctaaatagat

SEQ ID NO: 12817 - DNA, 21 bp, Homo sapiens
ccgctggcaactttacaggaa

SEQ ID NO: 12818 - DNA, 21 bp, Homo sapiens
atgcaaattcgtacaaaggta

SEQ ID NO: 12819 - DNA, 21 bp, Homo sapiens
aggctttaagacagatattaa

SEQ ID NO: 12820 - DNA, 21 bp, Homo sapiens
caccagagaaatcagaacaaa

SEQ ID NO: 12821 - DNA, 21 bp, Homo sapiens
cagcgtcttcttgctggagaa

SEQ ID NO: 12822 - DNA, 21 bp, Homo sapiens
accagctttgttggcatccaa

SEQ ID NO: 12823 - DNA, 21 bp, Homo sapiens
caggcatatcttgaagaacat

SEQ ID NO: 12824 - DNA, 21 bp, Homo sapiens
ctccttcttcttggtcacata

SEQ ID NO: 12825 - DNA, 21 bp, Homo sapiens
cctggtgactttgaaaggata

SEQ ID NO: 12826 - DNA, 21 bp, Homo sapiens
cccagaatccttgggaaatta

SEQ ID NO: 12827 - DNA, 21 bp, Homo sapiens
cccggccttctcctttaagta

SEQ ID NO: 12828 - DNA, 21 bp, Homo sapiens
tgggagctcactaagaacaaa

SEQ ID NO: 12829 - DNA, 21 bp, Homo sapiens
caggttccaggccatcagtaa

SEQ ID NO: 12830 - DNA, 21 bp, Homo sapiens
cagcccgacaagaataactat

SEQ ID NO: 12831 - DNA, 21 bp, Homo sapiens
cacagcaaactgcactacaaa

SEQ ID NO: 12832 - DNA, 21 bp, Homo sapiens
cacacagtccctggaaggcaa

SEQ ID NO: 12833 - DNA, 21 bp, Homo sapiens
aaggatttggaacaagcttaa

SEQ ID NO: 12834 - DNA, 21 bp, Homo sapiens
tcacaaataaattgtaattaa

SEQ ID NO: 12835 - DNA, 21 bp, Homo sapiens
cccgtggatgtgtacagtgat

SEQ ID NO: 12836 - DNA, 21 bp, Homo sapiens
ctggacaagggaagcccacta

SEQ ID NO: 12837 - DNA, 21 bp, Homo sapiens
ctgtctctatttatacaataa

SEQ ID NO: 12838 - DNA, 21 bp, Homo sapiens
taggccgatgcttgcttgcaa

SEQ ID NO: 12839 - DNA, 21 bp, Homo sapiens
ctgccaataattgatatacaa

SEQ ID NO: 12840 - DNA, 21 bp, Homo sapiens
cagcatgagaataagatgtta

SEQ ID NO: 12841 - DNA, 21 bp, Homo sapiens
ctggatgatgacagtcacgaa

SEQ ID NO: 12842 - DNA, 21 bp, Homo sapiens
cccgttggacacatgcaccaa

SEQ ID NO: 12843 - DNA, 21 bp, Homo sapiens
cacagtactcgcagtgcttaa

SEQ ID NO: 12844 - DNA, 21 bp, Homo sapiens
caactcgagatcgatcagcta

SEQ ID NO: 12845 - DNA, 21 bp, Homo sapiens
ccgactttcctaggcaacaaa

SEQ ID NO: 12846 - DNA, 21 bp, Homo sapiens
aagccgtgttctgattatcaa

SEQ ID NO: 12847 - DNA, 21 bp, Homo sapiens
ctgcccaagggtaaattgcta

SEQ ID NO: 12848 - DNA, 21 bp, Homo sapiens
cactgtaaagctcttcaccta

SEQ ID NO: 12849 - DNA, 21 bp, Homo sapiens
taggatttacacaagaagtaa

SEQ ID NO: 12850 - DNA, 21 bp, Homo sapiens
aacgcagataatccttacaaa

SEQ ID NO: 12851 - DNA, 21 bp, Homo sapiens
caacaagaacctcaactcaaa

SEQ ID NO: 12852 - DNA, 21 bp, Homo sapiens
gaggataatcctggaggtcaa

SEQ ID NO: 12853 - DNA, 21 bp, Homo sapiens
caggaacacttgatgaataaa

SEQ ID NO: 12854 - DNA, 21 bp, Homo sapiens
gcgcatcgacgtggaccgtaa

SEQ ID NO: 12855 - DNA, 21 bp, Homo sapiens
ccagtcgaaagtaatggctaa

SEQ ID NO: 12856 - DNA, 21 bp, Homo sapiens
ctccaaataaacaatggacaa

SEQ ID NO: 12857 - DNA, 21 bp, Homo sapiens
cagagttcaatttcagctcaa

SEQ ID NO: 12858 - DNA, 21 bp, Homo sapiens
caggatacagtatccaattta

SEQ ID NO: 12859 - DNA, 21 bp, Homo sapiens
cagcacagttccagaaagtaa

SEQ ID NO: 12860 - DNA, 21 bp, Homo sapiens
cagccaggaagtactacataa

SEQ ID NO: 12861 - DNA, 21 bp, Homo sapiens
aagcagctatgtagaaatgaa

SEQ ID NO: 12862 - DNA, 21 bp, Homo sapiens
cagcaagtttacactgcttaa

SEQ ID NO: 12863 - DNA, 21 bp, Homo sapiens
aaccctgaaattaaacaagaa

SEQ ID NO: 12864 - DNA, 21 bp, Homo sapiens
ctgaagtaaagcaacaagtaa

SEQ ID NO: 12865 - DNA, 21 bp, Homo sapiens
ctcggacgccgagaagctgaa

SEQ ID NO: 12866 - DNA, 21 bp, Homo sapiens
cggctgctcaagaagcacaaa

SEQ ID NO: 12867 - DNA, 21 bp, Homo sapiens
ctgatttatcatgtaccttaa

SEQ ID NO: 12868 - DNA, 21 bp, Homo sapiens
aacaatctgcattgattacaa

SEQ ID NO: 12869 - DNA, 21 bp, Homo sapiens
cagaggaagatcaaagatcaa

SEQ ID NO: 12870 - DNA, 21 bp, Homo sapiens
cagaaggaccacagtagagaa

SEQ ID NO: 12871 - DNA, 21 bp, Homo sapiens
cagggttacaccaaatctcaa

SEQ ID NO: 12872 - DNA, 21 bp, Homo sapiens
atgcagcatattatagacaaa

SEQ ID NO: 12873 - DNA, 21 bp, Homo sapiens
tggcaggaacgagaagtttaa

SEQ ID NO: 12874 - DNA, 21 bp, Homo sapiens
aacgagaagtttaactatgta

SEQ ID NO: 12875 - DNA, 21 bp, Homo sapiens
tggcaggaacgagaagtttaa

SEQ ID NO: 12876 - DNA, 21 bp, Homo sapiens
caggaacgagaagtttaacta

SEQ ID NO: 12877 - DNA, 21 bp, Homo sapiens
ccggatagcctcagtcaggga

SEQ ID NO: 12878 - DNA, 21 bp, Homo sapiens
ccatggcaagatactacataa

SEQ ID NO: 12879 - DNA, 21 bp, Homo sapiens
gcaagatactacataattaaa

SEQ ID NO: 12880 - DNA, 21 bp, Homo sapiens
aaggctctatacacaagagat

SEQ ID NO: 12881 - DNA, 21 bp, Homo sapiens
caccagtaaatggaccattaa

SEQ ID NO: 12882 - DNA, 21 bp, Homo sapiens
acgagtgaagtttatatccaa

SEQ ID NO: 12883 - DNA, 21 bp, Homo sapiens
cacggtagagtgggtggagaa

SEQ ID NO: 12884 - DNA, 21 bp, Homo sapiens
aagagtcttctagccctcaaa

SEQ ID NO: 12885 - DNA, 21 bp, Homo sapiens
cagagggatgaatttattaaa

SEQ ID NO: 12886 - DNA, 21 bp, Homo sapiens
ctggtggagtacaccatgata

SEQ ID NO: 12887 - DNA, 21 bp, Homo sapiens
aagggtcttgccaccacttaa

SEQ ID NO: 12888 - DNA, 21 bp, Homo sapiens
ccgccttaggcaagtattcaa

SEQ ID NO: 12889 - DNA, 21 bp, Homo sapiens
ctccatggacatagagagaaa

SEQ ID NO: 12890 - DNA, 21 bp, Homo sapiens
atggagaaagtttctgtgcta

SEQ ID NO: 12891 - DNA, 21 bp, Homo sapiens
ctccgggatgtggaatcgaaa

SEQ ID NO: 12892 - DNA, 21 bp, Homo sapiens
aaggaacgtgtctctctccaa

SEQ ID NO: 12893 - DNA, 21 bp, Homo sapiens
gtggtttagagagatcgtaaa

SEQ ID NO: 12894 - DNA, 21 bp, Homo sapiens
aacgatagtgtagctattgaa

SEQ ID NO: 12895 - DNA, 21 bp, Homo sapiens
ccacttcatatttgtatagaa

SEQ ID NO: 12896 - DNA, 21 bp, Homo sapiens
cagcacgaagaccaagcgcaa

SEQ ID NO: 12897 - DNA, 21 bp, Homo sapiens
tacaaacatatcacacattaa

SEQ ID NO: 12898 - DNA, 21 bp, Homo sapiens
cagaacataagtgtaacttta

SEQ ID NO: 12899 - DNA, 21 bp, Homo sapiens
aaggaagaaggacaccagtaa

SEQ ID NO: 12900 - DNA, 21 bp, Homo sapiens
aaggagcacgaagatgagaaa

SEQ ID NO: 12901 - DNA, 21 bp, Homo sapiens
ccggcaagaccgggaaacaaa

SEQ ID NO: 12902 - DNA, 21 bp, Homo sapiens
cagatctaacaaagtaggcta

SEQ ID NO: 12903 - DNA, 21 bp, Homo sapiens
taggagtggactagaagttta

SEQ ID NO: 12904 - DNA, 21 bp, Homo sapiens
aggagtggactagaagtttaa

SEQ ID NO: 12905 - DNA, 21 bp, Homo sapiens
ctgggttgacttgagaaagta

SEQ ID NO: 12906 - DNA, 21 bp, Homo sapiens
cagcaggtgcttgcaggcaaa

SEQ ID NO: 12907 - DNA, 21 bp, Homo sapiens
ccgggaggtgcgcaagattaa

SEQ ID NO: 12908 - DNA, 21 bp, Homo sapiens
cactgaggaattccaattcta

SEQ ID NO: 12909 - DNA, 21 bp, Homo sapiens
cccgggaggtgcgcaagatta

SEQ ID NO: 12910 - DNA, 21 bp, Homo sapiens
caactcgaagctggtcagcaa

SEQ ID NO: 12911 - DNA, 21 bp, Homo sapiens
caggtatgtgaccactatcaa

SEQ ID NO: 12912 - DNA, 21 bp, Homo sapiens
ctgagaagatttattacctaa

SEQ ID NO: 12913 - DNA, 21 bp, Homo sapiens
acggctttatttgttccttaa

SEQ ID NO: 12914 - DNA, 21 bp, Homo sapiens
ctgaagaaacgtaaccatcaa

SEQ ID NO: 12915 - DNA, 21 bp, Homo sapiens
cccgagaagagtctccaggaa

SEQ ID NO: 12916 - DNA, 21 bp, Homo sapiens
acgatgcaatctcaccgtgaa

SEQ ID NO: 12917 - DNA, 21 bp, Homo sapiens
ctggagcttggtgctgaggaa

SEQ ID NO: 12918 - DNA, 21 bp, Homo sapiens
ccgctgggactatgagaagaa

SEQ ID NO: 12919 - DNA, 21 bp, Homo sapiens
atcatcctcgatagtactcaa

SEQ ID NO: 12920 - DNA, 21 bp, Homo sapiens
cacggtgcttgtataactgta

SEQ ID NO: 12921 - DNA, 21 bp, Homo sapiens
ctcgctcagagaattaattat

SEQ ID NO: 12922 - DNA, 21 bp, Homo sapiens
cacagctaacacagctcttta

SEQ ID NO: 12923 - DNA, 21 bp, Homo sapiens
caggtactggatgatctgcaa

SEQ ID NO: 12924 - DNA, 21 bp, Homo sapiens
taggacttcattattctataa

SEQ ID NO: 12925 - DNA, 21 bp, Homo sapiens
cacctgcgggtgcaccttaaa

SEQ ID NO: 12926 - DNA, 21 bp, Homo sapiens
gccggctggatgtgactcaaa

SEQ ID NO: 12927 - DNA, 21 bp, Homo sapiens
cagaaataactcccaaacaaa

SEQ ID NO: 12928 - DNA, 21 bp, Homo sapiens
cacaccagtatttatccttaa

SEQ ID NO: 12929 - DNA, 21 bp, Homo sapiens
cagcgcgagagtagaagtgaa

SEQ ID NO: 12930 - DNA, 21 bp, Homo sapiens
taggatcattgcacagtataa

SEQ ID NO: 12931 - DNA, 21 bp, Homo sapiens
taggttcatttctgtacttaa

SEQ ID NO: 12932 - DNA, 21 bp, Homo sapiens
taggctcaattcatcccttaa

SEQ ID NO: 12933 - DNA, 21 bp, Homo sapiens
aaccttgttataagcagcaaa

SEQ ID NO: 12934 - DNA, 21 bp, Homo sapiens
ccggcgctatgggctgcctta

SEQ ID NO: 12935 - DNA, 21 bp, Homo sapiens
aagaagaatgagcactgtgaa

SEQ ID NO: 12936 - DNA, 21 bp, Homo sapiens
aatgacttcagcatcatgtac

SEQ ID NO: 12937 - DNA, 21 bp, Homo sapiens
ttcgagcatttcatatgcgaa

SEQ ID NO: 12938 - DNA, 21 bp, Homo sapiens
atcatacactatccaaatgaa

SEQ ID NO: 12939 - DNA, 21 bp, Homo sapiens
cacgaggaaagactgtaatta

SEQ ID NO: 12940 - DNA, 21 bp, Homo sapiens
acgaggaaagactgtaattaa

SEQ ID NO: 12941 - DNA, 21 bp, Homo sapiens
cagctgtgaaagcaacataaa

SEQ ID NO: 12942 - DNA, 21 bp, Homo sapiens
taccagttcactggtattaaa

SEQ ID NO: 12943 - DNA, 21 bp, Homo sapiens
caggttacacactaaagtaaa

SEQ ID NO: 12944 - DNA, 21 bp, Homo sapiens
ctcaggaatcaaggaacataa

SEQ ID NO: 12945 - DNA, 21 bp, Homo sapiens
atggctaaacatcatcctgat

SEQ ID NO: 12946 - DNA, 21 bp, Homo sapiens
ctggcacaccatatcggagaa

SEQ ID NO: 12947 - DNA, 21 bp, Homo sapiens
ttggctcgaatgtgtacataa

SEQ ID NO: 12948 - DNA, 21 bp, Homo sapiens
ctgttgctacaagacgattaa

SEQ ID NO: 12949 - DNA, 21 bp, Homo sapiens
tacctgcgtatctactaacaa

SEQ ID NO: 12950 - DNA, 21 bp, Homo sapiens
aaccagtatttaagtctataa

SEQ ID NO: 12951 - DNA, 21 bp, Homo sapiens
aaccatcagaataggcatcta

SEQ ID NO: 12952 - DNA, 21 bp, Homo sapiens
caggcataatgaatgatgaaa

SEQ ID NO: 12953 - DNA, 21 bp, Homo sapiens
ctgatataaatctaacacaaa

SEQ ID NO: 12954 - DNA, 21 bp, Homo sapiens
ttgacagagagtggtccctaa

SEQ ID NO: 12955 - DNA, 21 bp, Homo sapiens
atggaactcgatatccagata

SEQ ID NO: 12956 - DNA, 21 bp, Homo sapiens
atggaatacatcggcagccaa

SEQ ID NO: 12957 - DNA, 21 bp, Homo sapiens
aagggaagcattactgggtta

SEQ ID NO: 12958 - DNA, 21 bp, Homo sapiens
ctcgatatccagatataaata

SEQ ID NO: 12959 - DNA, 21 bp, Homo sapiens
caccaagagtggcaagataaa

SEQ ID NO: 12960 - DNA, 21 bp, Homo sapiens
ctgccatgacttccagaacaa

SEQ ID NO: 12961 - DNA, 21 bp, Homo sapiens
ctcgatcaaagtgctgtggaa

SEQ ID NO: 12962 - DNA, 21 bp, Homo sapiens
aagaagattgttagcacatta

SEQ ID NO: 12963 - DNA, 21 bp, Homo sapiens
cacagctctattaccttctaa

SEQ ID NO: 12964 - DNA, 21 bp, Homo sapiens
acgcgagtggttggacagata

SEQ ID NO: 12965 - DNA, 21 bp, Homo sapiens
caggcagatcatgaactacat

SEQ ID NO: 12966 - DNA, 21 bp, Homo sapiens
ttgaataaacgtgaacgtgaa

SEQ ID NO: 12967 - DNA, 21 bp, Homo sapiens
cagcaataatattatgtggaa

SEQ ID NO: 12968 - DNA, 21 bp, Homo sapiens
tgggctgtgtttcgaaatgaa

SEQ ID NO: 12969 - DNA, 21 bp, Homo sapiens
cccgctgttcattccttggaa

SEQ ID NO: 12970 - DNA, 21 bp, Homo sapiens
ctgcatagccgtgcttctcta

SEQ ID NO: 12971 - DNA, 21 bp, Homo sapiens
tagggcggaagtaccagtcaa

SEQ ID NO: 12972 - DNA, 21 bp, Homo sapiens
caccgtccttaccatgaagaa

SEQ ID NO: 12973 - DNA, 21 bp, Homo sapiens
cagcgagaacaagatcgttat

SEQ ID NO: 12974 - DNA, 21 bp, Homo sapiens
ccgctggcggctcaacttcaa

SEQ ID NO: 12975 - DNA, 21 bp, Homo sapiens
aaggacttccctgatgtgcta

SEQ ID NO: 12976 - DNA, 21 bp, Homo sapiens
caagggcaacacaaagcacaa

SEQ ID NO: 12977 - DNA, 21 bp, Homo sapiens
ctggattaatttatctgataa

SEQ ID NO: 12978 - DNA, 21 bp, Homo sapiens
caggtgaacaatggataacaa

SEQ ID NO: 12979 - DNA, 21 bp, Homo sapiens
tccagtggatttgatcgtcat

SEQ ID NO: 12980 - DNA, 21 bp, Homo sapiens
ccaagatagcactacatctaa

SEQ ID NO: 12981 - DNA, 21 bp, Homo sapiens
cacagtacatagcacctttaa

SEQ ID NO: 12982 - DNA, 21 bp, Homo sapiens
acagaccacaattactatata

SEQ ID NO: 12983 - DNA, 21 bp, Homo sapiens
ctggattgtgggagaactaaa

SEQ ID NO: 12984 - DNA, 21 bp, Homo sapiens
cccaactaaacctcaaatgaa

SEQ ID NO: 12985 - DNA, 21 bp, Homo sapiens
tacgtatttctagaccataaa

SEQ ID NO: 12986 - DNA, 21 bp, Homo sapiens
cagaaacttagttgaaggcaa

SEQ ID NO: 12987 - DNA, 21 bp, Homo sapiens
acagattatcacattaattta

SEQ ID NO: 12988 - DNA, 21 bp, Homo sapiens
cacagacttgaaggagtttaa

SEQ ID NO: 12989 - DNA, 21 bp, Homo sapiens
cagaccagagatgtttataca

SEQ ID NO: 12990 - DNA, 21 bp, Homo sapiens
ccctacgatgtatgaaatgta

SEQ ID NO: 12991 - DNA, 21 bp, Homo sapiens
ccagtttgggtcaaagtgcaa

SEQ ID NO: 12992 - DNA, 21 bp, Homo sapiens
ccggtttgttctcatgaacaa

SEQ ID NO: 12993 - DNA, 21 bp, Homo sapiens
accaaggaagaagaacaaata

SEQ ID NO: 12994 - DNA, 21 bp, Homo sapiens
cagctttataggtgtgaccta

SEQ ID NO: 12995 - DNA, 21 bp, Homo sapiens
cacgtaattgcaggaaatgta

SEQ ID NO: 12996 - DNA, 21 bp, Homo sapiens
acagatgaagttgacaagcta

SEQ ID NO: 12997 - DNA, 21 bp, Homo sapiens
cacaatcatctcagtggcgaa

SEQ ID NO: 12998 - DNA, 21 bp, Homo sapiens
ccgcaaggcctactccatcaa

SEQ ID NO: 12999 - DNA, 21 bp, Homo sapiens
aacctggatgtgaggcattaa

SEQ ID NO: 13000 - DNA, 21 bp, Homo sapiens
tccgacggaaatagaattgaa

SEQ ID NO: 13001 - DNA, 21 bp, Homo sapiens
aagagagttgttcttaggtta

SEQ ID NO: 13002 - DNA, 21 bp, Homo sapiens
aaccaaatcatcagttatcaa

SEQ ID NO: 13003 - DNA, 21 bp, Homo sapiens
ccggcttatttgagtggacaa

SEQ ID NO: 13004 - DNA, 21 bp, Homo sapiens
ccgcttaaggatgctaacatt

SEQ ID NO: 13005 - DNA, 21 bp, Homo sapiens
atggcagtaactggcagcgaa

SEQ ID NO: 13006 - DNA, 21 bp, Homo sapiens
caggacccatttacccaatat

SEQ ID NO: 13007 - DNA, 21 bp, Homo sapiens
gacccatttacccaatattaa

SEQ ID NO: 13008 - DNA, 21 bp, Homo sapiens
cttggcgaactgagtatttaa

SEQ ID NO: 13009 - DNA, 21 bp, Homo sapiens
atggatgaggtcatcatgaaa

SEQ ID NO: 13010 - DNA, 21 bp, Homo sapiens
ctcgctgggtttatatttgaa

SEQ ID NO: 13011 - DNA, 21 bp, Homo sapiens
tccgctgactgaaatacttaa

SEQ ID NO: 13012 - DNA, 21 bp, Homo sapiens
atggagtatgtgggtatagaa

SEQ ID NO: 13013 - DNA, 21 bp, Homo sapiens
cagctttagtaattactataa

SEQ ID NO: 13014 - DNA, 21 bp, Homo sapiens
ttgcatatgcataaattatta

SEQ ID NO: 13015 - DNA, 21 bp, Homo sapiens
atggcttatccttctctccaa

SEQ ID NO: 13016 - DNA, 21 bp, Homo sapiens
ctgcatctccaacaagtccaa

SEQ ID NO: 13017 - DNA, 21 bp, Homo sapiens
aagcatatataatgttatcaa

SEQ ID NO: 13018 - DNA, 21 bp, Homo sapiens
cagagaaagcatgttaaatta

SEQ ID NO: 13019 - DNA, 21 bp, Homo sapiens
cgggtgaaagatccaactaaa

SEQ ID NO: 13020 - DNA, 21 bp, Homo sapiens
caggaaattatcggaacataa

SEQ ID NO: 13021 - DNA, 21 bp, Homo sapiens
aagagaatcatttacaagtta

SEQ ID NO: 13022 - DNA, 21 bp, Homo sapiens
aaggagggactttctctggaa

SEQ ID NO: 13023 - DNA, 21 bp, Homo sapiens
aagggcatccatctacattta

SEQ ID NO: 13024 - DNA, 21 bp, Homo sapiens
tacatattaactgttcttcaa

SEQ ID NO: 13025 - DNA, 21 bp, Homo sapiens
cagcgtcaagttcatcaacaa

SEQ ID NO: 13026 - DNA, 21 bp, Homo sapiens
ctcgcctttgtttgccagtaa

SEQ ID NO: 13027 - DNA, 21 bp, Homo sapiens
taggaatttaagtccatagaa

SEQ ID NO: 13028 - DNA, 21 bp, Homo sapiens
aaagctagaattgcttatcaa

SEQ ID NO: 13029 - DNA, 21 bp, Homo sapiens
aggaagcttattctcatataa

SEQ ID NO: 13030 - DNA, 21 bp, Homo sapiens
ctagaattgcttatcaatcaa

SEQ ID NO: 13031 - DNA, 21 bp, Homo sapiens
ccgaggcaagtcaaagctgaa

SEQ ID NO: 13032 - DNA, 21 bp, Homo sapiens
gaagatcaaattgaagataaa

SEQ ID NO: 13033 - DNA, 21 bp, Homo sapiens
ctgcagatatttcatcaaata

SEQ ID NO: 13034 - DNA, 21 bp, Homo sapiens
atggctggaaatgcaaatgaa

SEQ ID NO: 13035 - DNA, 21 bp, Homo sapiens
ccggtgtatttgaataaacca

SEQ ID NO: 13036 - DNA, 21 bp, Homo sapiens
ccgctcatgatccaaagctta

SEQ ID NO: 13037 - DNA, 21 bp, Homo sapiens
ctcctccagttggatcatcaa

SEQ ID NO: 13038 - DNA, 21 bp, Homo sapiens
aggctacttgatggctctcaa

SEQ ID NO: 13039 - DNA, 21 bp, Homo sapiens
cagggatgtccgcaactacaa

SEQ ID NO: 13040 - DNA, 21 bp, Homo sapiens
ccgcaagttcatcgccgtgaa

SEQ ID NO: 13041 - DNA, 21 bp, Homo sapiens
aaccctaggatagtctcataa

SEQ ID NO: 13042 - DNA, 21 bp, Homo sapiens
ccgcgctcgggatgtcgtgaa

SEQ ID NO: 13043 - DNA, 21 bp, Homo sapiens
ctccatctttgtggataataa

SEQ ID NO: 13044 - DNA, 21 bp, Homo sapiens
gcgcctctccataaagatgaa

SEQ ID NO: 13045 - DNA, 21 bp, Homo sapiens
ctcgtctgtgtaacccataaa

SEQ ID NO: 13046 - DNA, 21 bp, Homo sapiens
cacgctctatgactttgacaa

SEQ ID NO: 13047 - DNA, 21 bp, Homo sapiens
cagcctcatgcacaccatcta

SEQ ID NO: 13048 - DNA, 21 bp, Homo sapiens
cacggagcgcagaaaccacta

SEQ ID NO: 13049 - DNA, 21 bp, Homo sapiens
tggaatcagaattcaacttaa

SEQ ID NO: 13050 - DNA, 21 bp, Homo sapiens
aacctccaatgtggacattta

SEQ ID NO: 13051 - DNA, 21 bp, Homo sapiens
cacaggcatttaaatatttaa

SEQ ID NO: 13052 - DNA, 21 bp, Homo sapiens
caggctcagggttaacagcta

SEQ ID NO: 13053 - DNA, 21 bp, Homo sapiens
gtgcaggatgtcaatatggaa

SEQ ID NO: 13054 - DNA, 21 bp, Homo sapiens
taaggagtcgttagcctttaa

SEQ ID NO: 13055 - DNA, 21 bp, Homo sapiens
agggctaagcatgcatgttaa

SEQ ID NO: 13056 - DNA, 21 bp, Homo sapiens
aaggctgtgtattacaagtat

SEQ ID NO: 13057 - DNA, 21 bp, Homo sapiens
cagatgtaccttataattcaa

SEQ ID NO: 13058 - DNA, 21 bp, Homo sapiens
aagctggatatttcctcttta

SEQ ID NO: 13059 - DNA, 21 bp, Homo sapiens
gaggaaactgtttaacctcaa

SEQ ID NO: 13060 - DNA, 21 bp, Homo sapiens
ctcgagaatcacagagcggaa

SEQ ID NO: 13061 - DNA, 21 bp, Homo sapiens
tcgaaggagctcagagttcaa

SEQ ID NO: 13062 - DNA, 21 bp, Homo sapiens
ccagctaatgaagataaacta

SEQ ID NO: 13063 - DNA, 21 bp, Homo sapiens
caccttcaagccgatgataaa

SEQ ID NO: 13064 - DNA, 21 bp, Homo sapiens
caggactttgatattggcaaa

SEQ ID NO: 13065 - DNA, 21 bp, Homo sapiens
ccggaacagtccggactacaa

SEQ ID NO: 13066 - DNA, 21 bp, Homo sapiens
caagaacttcagtgagactaa

SEQ ID NO: 13067 - DNA, 21 bp, Homo sapiens
cagcagatacagaaacatgaa

SEQ ID NO: 13068 - DNA, 21 bp, Homo sapiens
cagcatgaacttagtgctata

SEQ ID NO: 13069 - DNA, 21 bp, Homo sapiens
gagggtttgcctggaagttaa

SEQ ID NO: 13070 - DNA, 21 bp, Homo sapiens
caggagtctttgagtatcata

SEQ ID NO: 13071 - DNA, 21 bp, Homo sapiens
ttgaggatgaattaaacttaa

SEQ ID NO: 13072 - DNA, 21 bp, Homo sapiens
cagatttagtctagcatgaaa

SEQ ID NO: 13073 - DNA, 21 bp, Homo sapiens
caggcatagtttccactttaa

SEQ ID NO: 13074 - DNA, 21 bp, Homo sapiens
caccactgtgttgatatgtaa

SEQ ID NO: 13075 - DNA, 21 bp, Homo sapiens
gagaaatttctttgtctatta

SEQ ID NO: 13076 - DNA, 21 bp, Homo sapiens
ttggtggactagtatagtata

SEQ ID NO: 13077 - DNA, 21 bp, Homo sapiens
agcacctaaacttacatttaa

SEQ ID NO: 13078 - DNA, 21 bp, Homo sapiens
ctggaacaagtgtcacaatta

SEQ ID NO: 13079 - DNA, 21 bp, Homo sapiens
cagcttggtgactgtaattaa

SEQ ID NO: 13080 - DNA, 21 bp, Homo sapiens
aagcctgaacttggaaagata

SEQ ID NO: 13081 - DNA, 21 bp, Homo sapiens
aacatggtgaatatcgtttaa

SEQ ID NO: 13082 - DNA, 21 bp, Homo sapiens
ccgagaggagatcgtatcata

SEQ ID NO: 13083 - DNA, 21 bp, Homo sapiens
taggcaaagatgatcgtcata

SEQ ID NO: 13084 - DNA, 21 bp, Homo sapiens
tacgatcttgggtggagttta

SEQ ID NO: 13085 - DNA, 21 bp, Homo sapiens
acgatcttgggtggagtttaa

SEQ ID NO: 13086 - DNA, 21 bp, Homo sapiens
ttgggtggagtttaatgccaa

SEQ ID NO: 13087 - DNA, 21 bp, Homo sapiens
caggaactacgtggagatcat

SEQ ID NO: 13088 - DNA, 21 bp, Homo sapiens
gccgcgctacacctacttcaa

SEQ ID NO: 13089 - DNA, 21 bp, Homo sapiens
cccgactgtgctgctcgcgaa

SEQ ID NO: 13090 - DNA, 21 bp, Homo sapiens
accgccatcctctgcctcaaa

SEQ ID NO: 13091 - DNA, 21 bp, Homo sapiens
cagccgcaaggtggacattat

SEQ ID NO: 13092 - DNA, 21 bp, Homo sapiens
ctcgaactacctgttgcgcaa

SEQ ID NO: 13093 - DNA, 21 bp, Homo sapiens
cgggatcatctaagaaatgta

SEQ ID NO: 13094 - DNA, 21 bp, Homo sapiens
taggttgtcattcagacttta

SEQ ID NO: 13095 - DNA, 21 bp, Homo sapiens
cacctttaacgtggaccataa

SEQ ID NO: 13096 - DNA, 21 bp, Homo sapiens
cagcaagaatgtggacctcaa

SEQ ID NO: 13097 - DNA, 21 bp, Homo sapiens
ccgggatgtcgtccaagcata

SEQ ID NO: 13098 - DNA, 21 bp, Homo sapiens
atggctggccttgatcatcaa

SEQ ID NO: 13099 - DNA, 21 bp, Homo sapiens
cagctctaaggaagacttcaa

SEQ ID NO: 13100 - DNA, 21 bp, Homo sapiens
ctgggtgcagctatatgatta

SEQ ID NO: 13101 - DNA, 21 bp, Homo sapiens
aacattaagattacaagtgga

SEQ ID NO: 13102 - DNA, 21 bp, Homo sapiens
tccatacaaatgcacaacata

SEQ ID NO: 13103 - DNA, 21 bp, Homo sapiens
caccgcaacattaagattaca

SEQ ID NO: 13104 - DNA, 21 bp, Homo sapiens
atcggttaaatttgatgcaaa

SEQ ID NO: 13105 - DNA, 21 bp, Homo sapiens
aggaagggagttgattcctta

SEQ ID NO: 13106 - DNA, 21 bp, Homo sapiens
acggctgtggagggccttgta

SEQ ID NO: 13107 - DNA, 21 bp, Homo sapiens
ctgctggtacccgtcaacaaa

SEQ ID NO: 13108 - DNA, 21 bp, Homo sapiens
agcccagattgtggtagatta

SEQ ID NO: 13109 - DNA, 21 bp, Homo sapiens
aagccttgccagaaacgtcaa

SEQ ID NO: 13110 - DNA, 21 bp, Homo sapiens
ctggaaagacggcttatttaa

SEQ ID NO: 13111 - DNA, 21 bp, Homo sapiens
caacaggacatcagaacttat

SEQ ID NO: 13112 - DNA, 21 bp, Homo sapiens
caggaaatggaactacatata

SEQ ID NO: 13113 - DNA, 21 bp, Homo sapiens
ccgagactgattcctttagaa

SEQ ID NO: 13114 - DNA, 21 bp, Homo sapiens
atggaactacatatatgacaa

SEQ ID NO: 13115 - DNA, 21 bp, Homo sapiens
cagaaatacgagcctatcgaa

SEQ ID NO: 13116 - DNA, 21 bp, Homo sapiens
atggattcacgtgaatgtcta

SEQ ID NO: 13117 - DNA, 21 bp, Homo sapiens
cagcagactcgtgtaattaaa

SEQ ID NO: 13118 - DNA, 21 bp, Homo sapiens
ttagctatgcatcgcaataaa

SEQ ID NO: 13119 - DNA, 21 bp, Homo sapiens
caggagtaaagaactggctta

SEQ ID NO: 13120 - DNA, 21 bp, Homo sapiens
gagggatgaatatatcacaaa

SEQ ID NO: 13121 - DNA, 21 bp, Homo sapiens
ccggcttggagcccaggtcaa

SEQ ID NO: 13122 - DNA, 21 bp, Homo sapiens
atccgtgatttccacaggaaa

SEQ ID NO: 13123 - DNA, 21 bp, Homo sapiens
aacaggtatagccaaattcaa

SEQ ID NO: 13124 - DNA, 21 bp, Homo sapiens
tagacgaaatgtgccattata

SEQ ID NO: 13125 - DNA, 21 bp, Homo sapiens
cacgttaaatcaaggaaggaa

SEQ ID NO: 13126 - DNA, 21 bp, Homo sapiens
ttgaatggacctaactataca

SEQ ID NO: 13127 - DNA, 21 bp, Homo sapiens
ccggaccaccatcacagccaa

SEQ ID NO: 13128 - DNA, 21 bp, Homo sapiens
cagaacttggccacaccaata

SEQ ID NO: 13129 - DNA, 21 bp, Homo sapiens
caccaataggatttatggcaa

SEQ ID NO: 13130 - DNA, 21 bp, Homo sapiens
tcgaaagtacgccaatgtgaa

SEQ ID NO: 13131 - DNA, 21 bp, Homo sapiens
ctggcaataaagtcaaattaa

SEQ ID NO: 13132 - DNA, 21 bp, Homo sapiens
caggcatggatatgacctaca

SEQ ID NO: 13133 - DNA, 21 bp, Homo sapiens
tcagggctttaccaagctcaa

SEQ ID NO: 13134 - DNA, 21 bp, Homo sapiens
ctggctggcaataaagtcaaa

SEQ ID NO: 13135 - DNA, 21 bp, Homo sapiens
cagtatttatttgattattta

SEQ ID NO: 13136 - DNA, 21 bp, Homo sapiens
taggtttgtattgttgatcta

SEQ ID NO: 13137 - DNA, 21 bp, Homo sapiens
ctcgtgttaccttgatggata

SEQ ID NO: 13138 - DNA, 21 bp, Homo sapiens
cagggtctactcaactgtgga

SEQ ID NO: 13139 - DNA, 21 bp, Homo sapiens
atggctactctgagtgttata

SEQ ID NO: 13140 - DNA, 21 bp, Homo sapiens
caccgtcaattacatctggta

SEQ ID NO: 13141 - DNA, 21 bp, Homo sapiens
gaccagaataagtataaggaa

SEQ ID NO: 13142 - DNA, 21 bp, Homo sapiens
cagcttcgccgttctatggaa

SEQ ID NO: 13143 - DNA, 21 bp, Homo sapiens
cagcggctacagcgcagtgaa

SEQ ID NO: 13144 - DNA, 21 bp, Homo sapiens
aaggttgcggacgttgcacaa

SEQ ID NO: 13145 - DNA, 21 bp, Homo sapiens
ctgtcttggatacctatttaa

SEQ ID NO: 13146 - DNA, 21 bp, Homo sapiens
ccctttatgtgttgaaagtta

SEQ ID NO: 13147 - DNA, 21 bp, Homo sapiens
accggcttcggcagacagaaa

SEQ ID NO: 13148 - DNA, 21 bp, Homo sapiens
accgttgttctcgtaggtgaa

SEQ ID NO: 13149 - DNA, 21 bp, Homo sapiens
tacggtcggaaggaaagtaga

SEQ ID NO: 13150 - DNA, 21 bp, Homo sapiens
ccgaccaactgcagcacccaa

SEQ ID NO: 13151 - DNA, 21 bp, Homo sapiens
atgaatgattatcaaattaaa

SEQ ID NO: 13152 - DNA, 21 bp, Homo sapiens
ctgcggtgaagtcataataaa

SEQ ID NO: 13153 - DNA, 21 bp, Homo sapiens
aagcatgaaactaaattgaaa

SEQ ID NO: 13154 - DNA, 21 bp, Homo sapiens
cagaataactttatcacccaa

SEQ ID NO: 13155 - DNA, 21 bp, Homo sapiens
taccagcgaattcccacccta

SEQ ID NO: 13156 - DNA, 21 bp, Homo sapiens
tacaaagactcagatctccaa

SEQ ID NO: 13157 - DNA, 21 bp, Homo sapiens
cagcccaggagtggaaatgaa

SEQ ID NO: 13158 - DNA, 21 bp, Homo sapiens
ccagatggagtcgacgctcaa

SEQ ID NO: 13159 - DNA, 21 bp, Homo sapiens
cacacccattgcccacactta

SEQ ID NO: 13160 - DNA, 21 bp, Homo sapiens
ccgcatagcctatttgcgcaa

SEQ ID NO: 13161 - DNA, 21 bp, Homo sapiens
ccgcattaatgtctcaaggca

SEQ ID NO: 13162 - DNA, 21 bp, Homo sapiens
caccatggaggtccgcattaa

SEQ ID NO: 13163 - DNA, 21 bp, Homo sapiens
agggcccagtggtccagacaa

SEQ ID NO: 13164 - DNA, 21 bp, Homo sapiens
aaggtcaaggtttctgtcaca

SEQ ID NO: 13165 - DNA, 21 bp, Homo sapiens
cagctttccaagagcaggaaa

SEQ ID NO: 13166 - DNA, 21 bp, Homo sapiens
ctccatggcagccatgaacaa

SEQ ID NO: 13167 - DNA, 21 bp, Homo sapiens
ctgcgtggacatggtcatgaa

SEQ ID NO: 13168 - DNA, 21 bp, Homo sapiens
ccgggtgtgcgtgtccctcaa

SEQ ID NO: 13169 - DNA, 21 bp, Homo sapiens
atgaaagattattgtaataaa

SEQ ID NO: 13170 - DNA, 21 bp, Homo sapiens
ctacaggataatcttcgccaa

SEQ ID NO: 13171 - DNA, 21 bp, Homo sapiens
ctgagattggtatatgacaaa

SEQ ID NO: 13172 - DNA, 21 bp, Homo sapiens
caggaagctgagattggtata

SEQ ID NO: 13173 - DNA, 21 bp, Homo sapiens
gaggtcttcagtactattgaa

SEQ ID NO: 13174 - DNA, 21 bp, Homo sapiens
ccagaggaactcagttaagaa

SEQ ID NO: 13175 - DNA, 21 bp, Homo sapiens
gacgctagaaactaaattata

SEQ ID NO: 13176 - DNA, 21 bp, Homo sapiens
cagacgctagaaactaaatta

SEQ ID NO: 13177 - DNA, 21 bp, Homo sapiens
caggcacatatgaatgacaaa

SEQ ID NO: 13178 - DNA, 21 bp, Homo sapiens
ctccttgatgagatactacaa

SEQ ID NO: 13179 - DNA, 21 bp, Homo sapiens
ctcgcttatagagcaccagaa

SEQ ID NO: 13180 - DNA, 21 bp, Homo sapiens
aacgcgatgaattcagccgaa

SEQ ID NO: 13181 - DNA, 21 bp, Homo sapiens
cacagggttactggagcacta

SEQ ID NO: 13182 - DNA, 21 bp, Homo sapiens
caggcttatgcgtaagcttca

SEQ ID NO: 13183 - DNA, 21 bp, Homo sapiens
aagctttatgaaagctctcaa

SEQ ID NO: 13184 - DNA, 21 bp, Homo sapiens
acccaggtgattccaatgata

SEQ ID NO: 13185 - DNA, 21 bp, Homo sapiens
ttgctttatggaagaaagtaa

SEQ ID NO: 13186 - DNA, 21 bp, Homo sapiens
ctaggattctttgaatacaaa

SEQ ID NO: 13187 - DNA, 21 bp, Homo sapiens
gagggagatggtactataata

SEQ ID NO: 13188 - DNA, 21 bp, Homo sapiens
caagatttctgtaaagatcat

SEQ ID NO: 13189 - DNA, 21 bp, Homo sapiens
tcctggatgaataatattgaa

SEQ ID NO: 13190 - DNA, 21 bp, Homo sapiens
ctgggcttcctgggtcaagta

SEQ ID NO: 13191 - DNA, 21 bp, Homo sapiens
atgctggaaatttgactgcta

SEQ ID NO: 13192 - DNA, 21 bp, Homo sapiens
aaccaagaatattgttcttat

SEQ ID NO: 13193 - DNA, 21 bp, Homo sapiens
aacatgaactttcccagccaa

SEQ ID NO: 13194 - DNA, 21 bp, Homo sapiens
tcggagtgaggtgaacgatga

SEQ ID NO: 13195 - DNA, 21 bp, Homo sapiens
acgtatcttcttcataccaaa

SEQ ID NO: 13196 - DNA, 21 bp, Homo sapiens
cagcccatctgttgcacatta

SEQ ID NO: 13197 - DNA, 21 bp, Homo sapiens
cccagtctctctcacattcat

SEQ ID NO: 13198 - DNA, 21 bp, Homo sapiens
ctggaacattctggaaacttt

SEQ ID NO: 13199 - DNA, 21 bp, Homo sapiens
caccaggactcagaagacaaa

SEQ ID NO: 13200 - DNA, 21 bp, Homo sapiens
ctggccttggtttctatgtaa

SEQ ID NO: 13201 - DNA, 21 bp, Homo sapiens
ctgaaattagctactcaccaa

SEQ ID NO: 13202 - DNA, 21 bp, Homo sapiens
cagaggatagggaatctctta

SEQ ID NO: 13203 - DNA, 21 bp, Homo sapiens
tcaggtgttgtcctacatcaa

SEQ ID NO: 13204 - DNA, 21 bp, Homo sapiens
atacataatgtttgtatgaaa

SEQ ID NO: 13205 - DNA, 21 bp, Homo sapiens
cagactcgtgttggagagaaa

SEQ ID NO: 13206 - DNA, 21 bp, Homo sapiens
aagcataatttataaacaata

SEQ ID NO: 13207 - DNA, 21 bp, Homo sapiens
caggctaatcttgcacaacta

SEQ ID NO: 13208 - DNA, 21 bp, Homo sapiens
aagaaactaattatactacaa

SEQ ID NO: 13209 - DNA, 21 bp, Homo sapiens
ctgcagatatatgtggagtaa

SEQ ID NO: 13210 - DNA, 21 bp, Homo sapiens
aaggctaactgcggaatgaaa

SEQ ID NO: 13211 - DNA, 21 bp, Homo sapiens
caggagatgcttgtttgcaaa

SEQ ID NO: 13212 - DNA, 21 bp, Homo sapiens
aaccgtatatatcaatatgaa

SEQ ID NO: 13213 - DNA, 21 bp, Homo sapiens
cagacggaactcataaattaa

SEQ ID NO: 13214 - DNA, 21 bp, Homo sapiens
aaggttctaagtagaattgaa

SEQ ID NO: 13215 - DNA, 21 bp, Homo sapiens
aaggagtactttgaagagcaa

SEQ ID NO: 13216 - DNA, 21 bp, Homo sapiens
caggatgaagtacagattgaa

SEQ ID NO: 13217 - DNA, 21 bp, Homo sapiens
gaggacaaggctgacaagcaa

SEQ ID NO: 13218 - DNA, 21 bp, Homo sapiens
caccagcaccatcaacctcta

SEQ ID NO: 13219 - DNA, 21 bp, Homo sapiens
gcccgatgacatgaacaacaa

SEQ ID NO: 13220 - DNA, 21 bp, Homo sapiens
cgagttcttcgtgctgctcaa

SEQ ID NO: 13221 - DNA, 21 bp, Homo sapiens
ctgctgtggtctctgcttcta

SEQ ID NO: 13222 - DNA, 21 bp, Homo sapiens
atcgtggtatcccaagggtta

SEQ ID NO: 13223 - DNA, 21 bp, Homo sapiens
cacggccgacttcgtcttcat

SEQ ID NO: 13224 - DNA, 21 bp, Homo sapiens
ctgggaagagtcccatgctaa

SEQ ID NO: 13225 - DNA, 21 bp, Homo sapiens
ctgggtattccagcatattaa

SEQ ID NO: 13226 - DNA, 21 bp, Homo sapiens
taagaataagatagtcattaa

SEQ ID NO: 13227 - DNA, 21 bp, Homo sapiens
ttggctctgtgcatccttgaa

SEQ ID NO: 13228 - DNA, 21 bp, Homo sapiens
agcactataatatttattgta

SEQ ID NO: 13229 - DNA, 21 bp, Homo sapiens
cacgtgcagcctatatgggaa

SEQ ID NO: 13230 - DNA, 21 bp, Homo sapiens
ctggaacaaatcagtgaacaa

SEQ ID NO: 13231 - DNA, 21 bp, Homo sapiens
cccaggagttatcactgtaaa

SEQ ID NO: 13232 - DNA, 21 bp, Homo sapiens
tcctggtattaccaacataaa

SEQ ID NO: 13233 - DNA, 21 bp, Homo sapiens
ctgggtgttaatccagatcaa

SEQ ID NO: 13234 - DNA, 21 bp, Homo sapiens
aaggatgttgctcgactccaa

SEQ ID NO: 13235 - DNA, 21 bp, Homo sapiens
cgccaacaaattgactcgtta

SEQ ID NO: 13236 - DNA, 21 bp, Homo sapiens
tcggttgatcctgaaacagtt

SEQ ID NO: 13237 - DNA, 21 bp, Homo sapiens
cagcgtcgatttaatggctca

SEQ ID NO: 13238 - DNA, 21 bp, Homo sapiens
atcccgcatgttgtcaacata

SEQ ID NO: 13239 - DNA, 21 bp, Homo sapiens
aagctcataatgaatcagaca

SEQ ID NO: 13240 - DNA, 21 bp, Homo sapiens
ctccaagaaatgcctgcttct

SEQ ID NO: 13241 - DNA, 21 bp, Homo sapiens
acagccaaggatggcaagcaa

SEQ ID NO: 13242 - DNA, 21 bp, Homo sapiens
cctgagtttaatattacagaa

SEQ ID NO: 13243 - DNA, 21 bp, Homo sapiens
accaccatcctcagaagccaa

SEQ ID NO: 13244 - DNA, 21 bp, Homo sapiens
ctgaatcttattgagggacta

SEQ ID NO: 13245 - DNA, 21 bp, Homo sapiens
caaagtgataatgataagaaa

SEQ ID NO: 13246 - DNA, 21 bp, Homo sapiens
accgttaatggtaaagctgaa

SEQ ID NO: 13247 - DNA, 21 bp, Homo sapiens
acgggatacagagataaacaa

SEQ ID NO: 13248 - DNA, 21 bp, Homo sapiens
ctggatgaaaggagaaggcta

SEQ ID NO: 13249 - DNA, 21 bp, Homo sapiens
caggatcttggatgccctcaa

SEQ ID NO: 13250 - DNA, 21 bp, Homo sapiens
caggaaggagatgaaggtaga

SEQ ID NO: 13251 - DNA, 21 bp, Homo sapiens
cagggccgcagagctcgcgga

SEQ ID NO: 13252 - DNA, 21 bp, Homo sapiens
cggcttctctcaaggatgaga

SEQ ID NO: 13253 - DNA, 21 bp, Homo sapiens
cagcattattatagtgcttca

SEQ ID NO: 13254 - DNA, 21 bp, Homo sapiens
ttggatgagaatgaactcgaa

SEQ ID NO: 13255 - DNA, 21 bp, Homo sapiens
ccgcatcgtccagacctgcaa

SEQ ID NO: 13256 - DNA, 21 bp, Homo sapiens
ctggcctttgtgggcaccaaa

SEQ ID NO: 13257 - DNA, 21 bp, Homo sapiens
tacctgggaattcttcctaaa

SEQ ID NO: 13258 - DNA, 21 bp, Homo sapiens
cagccggaaactgaccaagaa

SEQ ID NO: 13259 - DNA, 21 bp, Homo sapiens
cccgataaccttcacactcaa

SEQ ID NO: 13260 - DNA, 21 bp, Homo sapiens
cagatacaactcagcattaaa

SEQ ID NO: 13261 - DNA, 21 bp, Homo sapiens
accaatttagaaataacaata

SEQ ID NO: 13262 - DNA, 21 bp, Homo sapiens
cagggcaagcagaggcagcaa

SEQ ID NO: 13263 - DNA, 21 bp, Homo sapiens
ctccgagagcaccacagtcaa

SEQ ID NO: 13264 - DNA, 21 bp, Homo sapiens
gagacattagtggaacttcaa

SEQ ID NO: 13265 - DNA, 21 bp, Homo sapiens
ctcatgcagattgagatcaaa

SEQ ID NO: 13266 - DNA, 21 bp, Homo sapiens
ccagaccttgaccgaccttta

SEQ ID NO: 13267 - DNA, 21 bp, Homo sapiens
aagtatgatgattgcagcaaa

SEQ ID NO: 13268 - DNA, 21 bp, Homo sapiens
cgctgcgagtgtggtgtttaa

SEQ ID NO: 13269 - DNA, 21 bp, Homo sapiens
aacctggtgtcaagatacaaa

SEQ ID NO: 13270 - DNA, 21 bp, Homo sapiens
accgccgctattctccagata

SEQ ID NO: 13271 - DNA, 21 bp, Homo sapiens
caggtgtcatgtggtgatgat

SEQ ID NO: 13272 - DNA, 21 bp, Homo sapiens
tcgggaattatcaaccatgaa

SEQ ID NO: 13273 - DNA, 21 bp, Homo sapiens
tacacttgggtgaacatgcaa

SEQ ID NO: 13274 - DNA, 21 bp, Homo sapiens
cacgaaccagtgaagtctata

SEQ ID NO: 13275 - DNA, 21 bp, Homo sapiens
tgggaacatgtacttatataa

SEQ ID NO: 13276 - DNA, 21 bp, Homo sapiens
cacgaggaaccctctccttaa

SEQ ID NO: 13277 - DNA, 21 bp, Homo sapiens
cacggtgctcttagcattcaa

SEQ ID NO: 13278 - DNA, 21 bp, Homo sapiens
atggaatttatggtaacttta

SEQ ID NO: 13279 - DNA, 21 bp, Homo sapiens
acgagaggaggtggaatatta

SEQ ID NO: 13280 - DNA, 21 bp, Homo sapiens
ctggaatgccacaaatgcaaa

SEQ ID NO: 13281 - DNA, 21 bp, Homo sapiens
ctgggagagcctgctgccaaa

SEQ ID NO: 13282 - DNA, 21 bp, Homo sapiens
caggcgctgtaccaaagcaaa

SEQ ID NO: 13283 - DNA, 21 bp, Homo sapiens
ccagttcaaactcaaattaaa

SEQ ID NO: 13284 - DNA, 21 bp, Homo sapiens
cccgcagtacaagaactggag

SEQ ID NO: 13285 - DNA, 21 bp, Homo sapiens
atacattaggttaaatctgaa

SEQ ID NO: 13286 - DNA, 21 bp, Homo sapiens
agggccaggtaaagaagctaa

SEQ ID NO: 13287 - DNA, 21 bp, Homo sapiens
cactaaggatataacagttaa

SEQ ID NO: 13288 - DNA, 21 bp, Homo sapiens
ctccaggtgattccagcataa

SEQ ID NO: 13289 - DNA, 21 bp, Homo sapiens
gagggccgccttcaacaacaa

SEQ ID NO: 13290 - DNA, 21 bp, Homo sapiens
cggaggttacaccctcagcaa

SEQ ID NO: 13291 - DNA, 21 bp, Homo sapiens
cagatttgtagggagaatgaa

SEQ ID NO: 13292 - DNA, 21 bp, Homo sapiens
tacaggcatgacatcaatgaa

SEQ ID NO: 13293 - DNA, 21 bp, Homo sapiens
cagcgtcatgaacaaagtcat

SEQ ID NO: 13294 - DNA, 21 bp, Homo sapiens
acggagaaagcagctccagaa

SEQ ID NO: 13295 - DNA, 21 bp, Homo sapiens
atcgtctgctttaacgcctta

SEQ ID NO: 13296 - DNA, 21 bp, Homo sapiens
aaccagcataatgaaatccaa

SEQ ID NO: 13297 - DNA, 21 bp, Homo sapiens
taccagcgaactcctgtttaa

SEQ ID NO: 13298 - DNA, 21 bp, Homo sapiens
atgcagtttgcatgttacaaa

SEQ ID NO: 13299 - DNA, 21 bp, Homo sapiens
ctgctctaaattccctatgaa

SEQ ID NO: 13300 - DNA, 21 bp, Homo sapiens
caggctttgagactcatgtaa

SEQ ID NO: 13301 - DNA, 21 bp, Homo sapiens
aaggcagttaagaaatagata

SEQ ID NO: 13302 - DNA, 21 bp, Homo sapiens
aggcagttaagaaatagataa

SEQ ID NO: 13303 - DNA, 21 bp, Homo sapiens
agggctgagaattgacgagaa

SEQ ID NO: 13304 - DNA, 21 bp, Homo sapiens
aacctgctatcaggaaatcta

SEQ ID NO: 13305 - DNA, 21 bp, Homo sapiens
caggttggtagcaaagatctt

SEQ ID NO: 13306 - DNA, 21 bp, Homo sapiens
caggtacaacttctatgtgaa

SEQ ID NO: 13307 - DNA, 21 bp, Homo sapiens
accgtctgttgcaagcatgaa

SEQ ID NO: 13308 - DNA, 21 bp, Homo sapiens
aaagctggcctcagacaacaa

SEQ ID NO: 13309 - DNA, 21 bp, Homo sapiens
tccgatattcttcccgcagta

SEQ ID NO: 13310 - DNA, 21 bp, Homo sapiens
cagaactggattgccaatgta

SEQ ID NO: 13311 - DNA, 21 bp, Homo sapiens
ctgcactaaattccttcatta

SEQ ID NO: 13312 - DNA, 21 bp, Homo sapiens
aagttcctatctaatattata

SEQ ID NO: 13313 - DNA, 21 bp, Homo sapiens
aaggactttaagaaagatcaa

SEQ ID NO: 13314 - DNA, 21 bp, Homo sapiens
aagattaagattatacttcaa

SEQ ID NO: 13315 - DNA, 21 bp, Homo sapiens
ccgctccagggcttctctaaa

SEQ ID NO: 13316 - DNA, 21 bp, Homo sapiens
caggcccaaatcgccacctca

SEQ ID NO: 13317 - DNA, 21 bp, Homo sapiens
caggcaaggctgcaagattaa

SEQ ID NO: 13318 - DNA, 21 bp, Homo sapiens
atcctcgagtacaacaatgaa

SEQ ID NO: 13319 - DNA, 21 bp, Homo sapiens
ctcgctcaacgtcttcgtcaa

SEQ ID NO: 13320 - DNA, 21 bp, Homo sapiens
catggctgtcacaaagcttta

SEQ ID NO: 13321 - DNA, 21 bp, Homo sapiens
aagctttatttgagcaaatta

SEQ ID NO: 13322 - DNA, 21 bp, Homo sapiens
atgaagagcgtttctaataaa

SEQ ID NO: 13323 - DNA, 21 bp, Homo sapiens
cccggtgtaaccatttatgaa

SEQ ID NO: 13324 - DNA, 21 bp, Homo sapiens
atcgagatcaatgaaccttta

SEQ ID NO: 13325 - DNA, 21 bp, Homo sapiens
ctgggaaatggccagaagata

SEQ ID NO: 13326 - DNA, 21 bp, Homo sapiens
cacatgttcagtgcccaggaa

SEQ ID NO: 13327 - DNA, 21 bp, Homo sapiens
gtggctcaacctcatcttcaa

SEQ ID NO: 13328 - DNA, 21 bp, Homo sapiens
caggtgctggctggcctaata

SEQ ID NO: 13329 - DNA, 21 bp, Homo sapiens
ccggacatacaaatatttcaa

SEQ ID NO: 13330 - DNA, 21 bp, Homo sapiens
caccctggtctcggaatctaa

SEQ ID NO: 13331 - DNA, 21 bp, Homo sapiens
taggattatttacttaccaaa

SEQ ID NO: 13332 - DNA, 21 bp, Homo sapiens
cagaataatgatttctcctaa

SEQ ID NO: 13333 - DNA, 21 bp, Homo sapiens
caccaagaagttctcctacaa

SEQ ID NO: 13334 - DNA, 21 bp, Homo sapiens
ccggtcttcattggcaatatt

SEQ ID NO: 13335 - DNA, 21 bp, Homo sapiens
cagcctttcatacttgtttaa

SEQ ID NO: 13336 - DNA, 21 bp, Homo sapiens
caagggtggaatggaagttaa

SEQ ID NO: 13337 - DNA, 21 bp, Homo sapiens
caggcaggccctggtcatcta

SEQ ID NO: 13338 - DNA, 21 bp, Homo sapiens
aacgctctggatcctcttcta

SEQ ID NO: 13339 - DNA, 21 bp, Homo sapiens
cagggcctccttggaataaat

SEQ ID NO: 13340 - DNA, 21 bp, Homo sapiens
ccagctagtgttcatccagaa

SEQ ID NO: 13341 - DNA, 21 bp, Homo sapiens
aagcgagttcacaaatagcta

SEQ ID NO: 13342 - DNA, 21 bp, Homo sapiens
cgcctttagacttatcttaaa

SEQ ID NO: 13343 - DNA, 21 bp, Homo sapiens
aaggtgtaatctcgaccttga

SEQ ID NO: 13344 - DNA, 21 bp, Homo sapiens
ctcggttgactcgccatcgaa

SEQ ID NO: 13345 - DNA, 21 bp, Homo sapiens
cggaaatgtccggtcgtggta

SEQ ID NO: 13346 - DNA, 21 bp, Homo sapiens
ccgcggtgctcgagtacttga

SEQ ID NO: 13347 - DNA, 21 bp, Homo sapiens
cggcatgaagaagcacatcaa

SEQ ID NO: 13348 - DNA, 21 bp, Homo sapiens
caggttagaagacatacagaa

SEQ ID NO: 13349 - DNA, 21 bp, Homo sapiens
cccgagtgatctgaggattta

SEQ ID NO: 13350 - DNA, 21 bp, Homo sapiens
gaggctagcactaataggaaa

SEQ ID NO: 13351 - DNA, 21 bp, Homo sapiens
caggaaagacaacaaatacta

SEQ ID NO: 13352 - DNA, 21 bp, Homo sapiens
ctgggacgtgaccaccactaa

SEQ ID NO: 13353 - DNA, 21 bp, Homo sapiens
ttggatgtttgtagataacaa

SEQ ID NO: 13354 - DNA, 21 bp, Homo sapiens
taggataagtttagaacttga

SEQ ID NO: 13355 - DNA, 21 bp, Homo sapiens
cacgtgtataatggaaatgat

SEQ ID NO: 13356 - DNA, 21 bp, Homo sapiens
cagagagaccatgcatctgaa

SEQ ID NO: 13357 - DNA, 21 bp, Homo sapiens
cccgctgagccgcctgagcaa

SEQ ID NO: 13358 - DNA, 21 bp, Homo sapiens
cagccaggagttcttcttcga

SEQ ID NO: 13359 - DNA, 21 bp, Homo sapiens
atgaacgatgtcaatgaccta

SEQ ID NO: 13360 - DNA, 21 bp, Homo sapiens
ttgcctatcatgcacatgtaa

SEQ ID NO: 13361 - DNA, 21 bp, Homo sapiens
caggctgtggaccgcaaataa

SEQ ID NO: 13362 - DNA, 21 bp, Homo sapiens
cacgcctaagtagacatgaaa

SEQ ID NO: 13363 - DNA, 21 bp, Homo sapiens
cggaataaacaggacctttga

SEQ ID NO: 13364 - DNA, 21 bp, Homo sapiens
caacggctccctgttctataa

SEQ ID NO: 13365 - DNA, 21 bp, Homo sapiens
cacggacgtgcccttccacaa

SEQ ID NO: 13366 - DNA, 21 bp, Homo sapiens
caggacctttgacatttgaaa

SEQ ID NO: 13367 - DNA, 21 bp, Homo sapiens
tgggcccagattgcagagaaa

SEQ ID NO: 13368 - DNA, 21 bp, Homo sapiens
ccggcatttatgagtgccaca

SEQ ID NO: 13369 - DNA, 21 bp, Homo sapiens
caggtgaagtctatcaaagaa

SEQ ID NO: 13370 - DNA, 21 bp, Homo sapiens
ccgggatgacgtggccttgaa

SEQ ID NO: 13371 - DNA, 21 bp, Homo sapiens
cagagacggtttccaaatgaa

SEQ ID NO: 13372 - DNA, 21 bp, Homo sapiens
cccggaggaactggtggtgca

SEQ ID NO: 13373 - DNA, 21 bp, Homo sapiens
cccgctcgctgcggttgatta

SEQ ID NO: 13374 - DNA, 21 bp, Homo sapiens
taggccagaggtgaacattca

SEQ ID NO: 13375 - DNA, 21 bp, Homo sapiens
cagccggacagtggtgtacaa

SEQ ID NO: 13376 - DNA, 21 bp, Homo sapiens
caggctggtaaatttaggata

SEQ ID NO: 13377 - DNA, 21 bp, Homo sapiens
catgttaaggatacaaatcaa

SEQ ID NO: 13378 - DNA, 21 bp, Homo sapiens
cagcatgagaaacatctgcaa

SEQ ID NO: 13379 - DNA, 21 bp, Homo sapiens
cagaattcaatgaaacactaa

SEQ ID NO: 13380 - DNA, 21 bp, Homo sapiens
atggatttggctgctattgaa

SEQ ID NO: 13381 - DNA, 21 bp, Homo sapiens
caccattgtattggacactaa

SEQ ID NO: 13382 - DNA, 21 bp, Homo sapiens
cagggcgttgctattactata

SEQ ID NO: 13383 - DNA, 21 bp, Homo sapiens
ccggaggatactgctgattaa

SEQ ID NO: 13384 - DNA, 21 bp, Homo sapiens
ttggataaagtttgttctcaa

SEQ ID NO: 13385 - DNA, 21 bp, Homo sapiens
ctccatcaaacgtgccttaaa

SEQ ID NO: 13386 - DNA, 21 bp, Homo sapiens
ccgatgcttcactgtgccaaa

SEQ ID NO: 13387 - DNA, 21 bp, Homo sapiens
ctggctttctgcgagacgcat

SEQ ID NO: 13388 - DNA, 21 bp, Homo sapiens
caagattgccgaggcccgcaa

SEQ ID NO: 13389 - DNA, 21 bp, Homo sapiens
caagacggtggaacagctgaa

SEQ ID NO: 13390 - DNA, 21 bp, Homo sapiens
acagctgaagctggaggtgaa

SEQ ID NO: 13391 - DNA, 21 bp, Homo sapiens
cagaacgatgttgacctgtta

SEQ ID NO: 13392 - DNA, 21 bp, Homo sapiens
aagggacatttggttaggtta

SEQ ID NO: 13393 - DNA, 21 bp, Homo sapiens
ctgggagacactagtagtata

SEQ ID NO: 13394 - DNA, 21 bp, Homo sapiens
ccgcgtcagtacaattactaa

SEQ ID NO: 13395 - DNA, 21 bp, Homo sapiens
aaggatcatagtgaaatactt

SEQ ID NO: 13396 - DNA, 21 bp, Homo sapiens
ccggccaaagtgaaccacgta

SEQ ID NO: 13397 - DNA, 21 bp, Homo sapiens
tcgcaataatgcagaagttta

SEQ ID NO: 13398 - DNA, 21 bp, Homo sapiens
atggaaacttacaggacttaa

SEQ ID NO: 13399 - DNA, 21 bp, Homo sapiens
ccctgtagacagagaaaccaa

SEQ ID NO: 13400 - DNA, 21 bp, Homo sapiens
ccgcatggcagacagcttaaa

SEQ ID NO: 13401 - DNA, 21 bp, Homo sapiens
cagggaattgtgtctgcagaa

SEQ ID NO: 13402 - DNA, 21 bp, Homo sapiens
ctggctagggttacccagcaa

SEQ ID NO: 13403 - DNA, 21 bp, Homo sapiens
taggtgctttctagaatcaaa

SEQ ID NO: 13404 - DNA, 21 bp, Homo sapiens
cccaatatgagtaaacaggaa

SEQ ID NO: 13405 - DNA, 21 bp, Homo sapiens
caccagcctctccttgaataa

SEQ ID NO: 13406 - DNA, 21 bp, Homo sapiens
aagtttcaaattgacattcca

SEQ ID NO: 13407 - DNA, 21 bp, Homo sapiens
aagctgcacactggtattaaa

SEQ ID NO: 13408 - DNA, 21 bp, Homo sapiens
acctattgttctggaaactaa

SEQ ID NO: 13409 - DNA, 21 bp, Homo sapiens
caggctggtgggcaccaggaa

SEQ ID NO: 13410 - DNA, 21 bp, Homo sapiens
aagcatatggctgtcctataa

SEQ ID NO: 13411 - DNA, 21 bp, Homo sapiens
ccgcttaaggaaggaaggaaa

SEQ ID NO: 13412 - DNA, 21 bp, Homo sapiens
ctggcagacgaggaagtataa

SEQ ID NO: 13413 - DNA, 21 bp, Homo sapiens
acgaggaagtataacaccaaa

SEQ ID NO: 13414 - DNA, 21 bp, Homo sapiens
aagtacttcgatggactcaaa

SEQ ID NO: 13415 - DNA, 21 bp, Homo sapiens
ctgcagaacctgcttcatata

SEQ ID NO: 13416 - DNA, 21 bp, Homo sapiens
cagcactccatcgacgatgaa

SEQ ID NO: 13417 - DNA, 21 bp, Homo sapiens
ttggctcgaatgcacgatgaa

SEQ ID NO: 13418 - DNA, 21 bp, Homo sapiens
ctaagtaaaggtgttaagata

SEQ ID NO: 13419 - DNA, 21 bp, Homo sapiens
taagtttataccgctaaacaa

SEQ ID NO: 13420 - DNA, 21 bp, Homo sapiens
aagtattggcgtataacatta

SEQ ID NO: 13421 - DNA, 21 bp, Homo sapiens
ccggcagatctgcaacatgta

SEQ ID NO: 13422 - DNA, 21 bp, Homo sapiens
ccaagtgagattgcacattta

SEQ ID NO: 13423 - DNA, 21 bp, Homo sapiens
gcggatgaactcagccaacta

SEQ ID NO: 13424 - DNA, 21 bp, Homo sapiens
ccggtttgtggtggaagatta

SEQ ID NO: 13425 - DNA, 21 bp, Homo sapiens
aagcaagggtaccgccacata

SEQ ID NO: 13426 - DNA, 21 bp, Homo sapiens
taggtttgtaactgtttcata

SEQ ID NO: 13427 - DNA, 21 bp, Homo sapiens
cccgaggaggtggaacctcaa

SEQ ID NO: 13428 - DNA, 21 bp, Homo sapiens
ccgccaccatgtgaacttcaa

SEQ ID NO: 13429 - DNA, 21 bp, Homo sapiens
acccgtcaaatctgtgcctta

SEQ ID NO: 13430 - DNA, 21 bp, Homo sapiens
ccgagccgacagctcctttaa

SEQ ID NO: 13431 - DNA, 21 bp, Homo sapiens
ccgcagaaaggtctcggagaa

SEQ ID NO: 13432 - DNA, 21 bp, Homo sapiens
caggaggagcgcaaaccttga

SEQ ID NO: 13433 - DNA, 21 bp, Homo sapiens
caggaggttatcaaagcctat

SEQ ID NO: 13434 - DNA, 21 bp, Homo sapiens
tccgctgaacctagagcttca

SEQ ID NO: 13435 - DNA, 21 bp, Homo sapiens
taagcaaattgcacagatcaa

SEQ ID NO: 13436 - DNA, 21 bp, Homo sapiens
aaagtttggagtgtcactgaa

SEQ ID NO: 13437 - DNA, 21 bp, Homo sapiens
cacctccaagaccatcgtgta

SEQ ID NO: 13438 - DNA, 21 bp, Homo sapiens
tagttcaagtatgcaacataa

SEQ ID NO: 13439 - DNA, 21 bp, Homo sapiens
tcggtatgagtgcaacattaa

SEQ ID NO: 13440 - DNA, 21 bp, Homo sapiens
cagcattactaccataggcaa

SEQ ID NO: 13441 - DNA, 21 bp, Homo sapiens
ccagcctaaatgtgaccataa

SEQ ID NO: 13442 - DNA, 21 bp, Homo sapiens
cagcctaaatgtgaccataaa

SEQ ID NO: 13443 - DNA, 21 bp, Homo sapiens
cagcgctttgattacactaat

SEQ ID NO: 13444 - DNA, 21 bp, Homo sapiens
caagggtataccattcctaaa

SEQ ID NO: 13445 - DNA, 21 bp, Homo sapiens
ccggaggatttctaccctaat

SEQ ID NO: 13446 - DNA, 21 bp, Homo sapiens
cgggtgtgtatgggagaacaa

SEQ ID NO: 13447 - DNA, 21 bp, Homo sapiens
tccgacaactccggccaataa

SEQ ID NO: 13448 - DNA, 21 bp, Homo sapiens
ctgccaggagatggccaagaa

SEQ ID NO: 13449 - DNA, 21 bp, Homo sapiens
caggaactcttaaacactgaa

SEQ ID NO: 13450 - DNA, 21 bp, Homo sapiens
atcaatcaacttgctaattta

SEQ ID NO: 13451 - DNA, 21 bp, Homo sapiens
cagccttaattctacctgcaa

SEQ ID NO: 13452 - DNA, 21 bp, Homo sapiens
tcccgtctcttccattctcta

SEQ ID NO: 13453 - DNA, 21 bp, Homo sapiens
ctgagtggaagttatctgtca

SEQ ID NO: 13454 - DNA, 21 bp, Homo sapiens
ccgagctgtcctgcagctgta

SEQ ID NO: 13455 - DNA, 21 bp, Homo sapiens
ccctaacagtgccaaagcaaa

SEQ ID NO: 13456 - DNA, 21 bp, Homo sapiens
cagggagtctgtgttcaccaa

SEQ ID NO: 13457 - DNA, 21 bp, Homo sapiens
ccacaagttctacaaagccaa

SEQ ID NO: 13458 - DNA, 21 bp, Homo sapiens
cagaggcacccggtacagata

SEQ ID NO: 13459 - DNA, 21 bp, Homo sapiens
aagccaaatgccggaattcaa

SEQ ID NO: 13460 - DNA, 21 bp, Homo sapiens
ctggatcttgatattccagta

SEQ ID NO: 13461 - DNA, 21 bp, Homo sapiens
aaggcagaccatgtggatcta

SEQ ID NO: 13462 - DNA, 21 bp, Homo sapiens
aagccaagaatccacagtgta

SEQ ID NO: 13463 - DNA, 21 bp, Homo sapiens
ttgataatttatatctctcaa

SEQ ID NO: 13464 - DNA, 21 bp, Homo sapiens
acagaactagttgactatata

SEQ ID NO: 13465 - DNA, 21 bp, Homo sapiens
aactaggtacagcgactttaa

SEQ ID NO: 13466 - DNA, 21 bp, Homo sapiens
cacaagaccattgtactgcaa

SEQ ID NO: 13467 - DNA, 21 bp, Homo sapiens
ttgggaaaggctgatgagtaa

SEQ ID NO: 13468 - DNA, 21 bp, Homo sapiens
ttggagagtattgatttcaaa

SEQ ID NO: 13469 - DNA, 21 bp, Homo sapiens
ctgaagaaagatctagctgaa

SEQ ID NO: 13470 - DNA, 21 bp, Homo sapiens
tgggttcaaactacagatcta

SEQ ID NO: 13471 - DNA, 21 bp, Homo sapiens
caaactggaactcataaatta

SEQ ID NO: 13472 - DNA, 21 bp, Homo sapiens
aaggatctctatatcctagaa

SEQ ID NO: 13473 - DNA, 21 bp, Homo sapiens
cagccacttcttctgaaagaa

SEQ ID NO: 13474 - DNA, 21 bp, Homo sapiens
ctgccagactgtcgtccgaaa

SEQ ID NO: 13475 - DNA, 21 bp, Homo sapiens
caggatggtggcgtgtatgaa

SEQ ID NO: 13476 - DNA, 21 bp, Homo sapiens
cagactgtcgtccgaaacata

SEQ ID NO: 13477 - DNA, 21 bp, Homo sapiens
gccgcctttctcggaactgaa

SEQ ID NO: 13478 - DNA, 21 bp, Homo sapiens
ccggatgggtagacaacacga

SEQ ID NO: 13479 - DNA, 21 bp, Homo sapiens
ccgggagacaggacccaggaa

SEQ ID NO: 13480 - DNA, 21 bp, Homo sapiens
gcgggaggatgtgacaaggaa

SEQ ID NO: 13481 - DNA, 21 bp, Homo sapiens
ctggtacacccttatatggaa

SEQ ID NO: 13482 - DNA, 21 bp, Homo sapiens
ctggcattcctcaatatggta

SEQ ID NO: 13483 - DNA, 21 bp, Homo sapiens
caggtgtatgatggaccaaat

SEQ ID NO: 13484 - DNA, 21 bp, Homo sapiens
cacggtttgcacaatggtata

SEQ ID NO: 13485 - DNA, 21 bp, Homo sapiens
cacggttgcacttccattcca

SEQ ID NO: 13486 - DNA, 21 bp, Homo sapiens
caggcctgacttcccaaccta

SEQ ID NO: 13487 - DNA, 21 bp, Homo sapiens
cagagttatgtcctaactatt

SEQ ID NO: 13488 - DNA, 21 bp, Homo sapiens
gacgttagaagttgtcattta

SEQ ID NO: 13489 - DNA, 21 bp, Homo sapiens
ccggtttgtgaaagcatataa

SEQ ID NO: 13490 - DNA, 21 bp, Homo sapiens
atgcagtttattaatattgta

SEQ ID NO: 13491 - DNA, 21 bp, Homo sapiens
aagctacatgatagaaatata

SEQ ID NO: 13492 - DNA, 21 bp, Homo sapiens
taggctgttaacaaatctcaa

SEQ ID NO: 13493 - DNA, 21 bp, Homo sapiens
caggacgatctcgcctcttga

SEQ ID NO: 13494 - DNA, 21 bp, Homo sapiens
aagcctggtcaatatccgaaa

SEQ ID NO: 13495 - DNA, 21 bp, Homo sapiens
aagcgtgaaagcactggacaa

SEQ ID NO: 13496 - DNA, 21 bp, Homo sapiens
tcgggtagccatcaccatcta

SEQ ID NO: 13497 - DNA, 21 bp, Homo sapiens
caggacagaatgggaattcaa

SEQ ID NO: 13498 - DNA, 21 bp, Homo sapiens
ccggtttgagttgttatataa

SEQ ID NO: 13499 - DNA, 21 bp, Homo sapiens
ttggagaagggtgaccatgaa

SEQ ID NO: 13500 - DNA, 21 bp, Homo sapiens
caacgtcttcatgaaggacaa

SEQ ID NO: 13501 - DNA, 21 bp, Homo sapiens
ctccagtccttcggacttaaa

SEQ ID NO: 13502 - DNA, 21 bp, Homo sapiens
ctccattgtttgagccaagaa

SEQ ID NO: 13503 - DNA, 21 bp, Homo sapiens
cagggaatgtagtttcacaaa

SEQ ID NO: 13504 - DNA, 21 bp, Homo sapiens
cacaatttactccacaattaa

SEQ ID NO: 13505 - DNA, 21 bp, Homo sapiens
cgcattgaccttgacactgaa

SEQ ID NO: 13506 - DNA, 21 bp, Homo sapiens
ctggcaagatatgaagtggaa

SEQ ID NO: 13507 - DNA, 21 bp, Homo sapiens
cagaactataatgtgattcaa

SEQ ID NO: 13508 - DNA, 21 bp, Homo sapiens
atggtttaaattagttaatta

SEQ ID NO: 13509 - DNA, 21 bp, Homo sapiens
cagcaacaagttagtattgca

SEQ ID NO: 13510 - DNA, 21 bp, Homo sapiens
caggaagacctgtgctataaa

SEQ ID NO: 13511 - DNA, 21 bp, Homo sapiens
caggagtggaagagactagga

SEQ ID NO: 13512 - DNA, 21 bp, Homo sapiens
aacctccagaagggagtccaa

SEQ ID NO: 13513 - DNA, 21 bp, Homo sapiens
caccttggacaacctccagaa

SEQ ID NO: 13514 - DNA, 21 bp, Homo sapiens
cagctgcggctcagcacagta

SEQ ID NO: 13515 - DNA, 21 bp, Homo sapiens
cagcattcagtttgtcaatga

SEQ ID NO: 13516 - DNA, 21 bp, Homo sapiens
ctggtgttaaatggagctatt

SEQ ID NO: 13517 - DNA, 21 bp, Homo sapiens
cagggttctgagaacatttca

SEQ ID NO: 13518 - DNA, 21 bp, Homo sapiens
agcattcagtttgtcaatgaa

SEQ ID NO: 13519 - DNA, 21 bp, Homo sapiens
cacatacatagtgttactaga

SEQ ID NO: 13520 - DNA, 21 bp, Homo sapiens
aagcggtactctagaaatgaa

SEQ ID NO: 13521 - DNA, 21 bp, Homo sapiens
cagatatgatggcatttataa

SEQ ID NO: 13522 - DNA, 21 bp, Homo sapiens
cactatattccctaaagtata

SEQ ID NO: 13523 - DNA, 21 bp, Homo sapiens
aaacatattaataaagtataa

SEQ ID NO: 13524 - DNA, 21 bp, Homo sapiens
cgggcgggcgcggacgcggaa

SEQ ID NO: 13525 - DNA, 21 bp, Homo sapiens
caggaccatatgagaactgga

SEQ ID NO: 13526 - DNA, 21 bp, Homo sapiens
ctggatatgtatacaagaaca

SEQ ID NO: 13527 - DNA, 21 bp, Homo sapiens
cccatggagtttggtgtgctt

SEQ ID NO: 13528 - DNA, 21 bp, Homo sapiens
acggccggccctgagcaacaa

SEQ ID NO: 13529 - DNA, 21 bp, Homo sapiens
ctcctgttcctgtgccttcaa

SEQ ID NO: 13530 - DNA, 21 bp, Homo sapiens
ccgggaatctctgatgccaca

SEQ ID NO: 13531 - DNA, 21 bp, Homo sapiens
caccatgagcttcgtggcata

SEQ ID NO: 13532 - DNA, 21 bp, Homo sapiens
cacggtggagttccaccagca

SEQ ID NO: 13533 - DNA, 21 bp, Homo sapiens
ccgcagcggcacgcccatgaa

SEQ ID NO: 13534 - DNA, 21 bp, Homo sapiens
ccaagtgtgagtgatgagcaa

SEQ ID NO: 13535 - DNA, 21 bp, Homo sapiens
aaggacatttgccaacaatga

SEQ ID NO: 13536 - DNA, 21 bp, Homo sapiens
gtggcaaatatgtgatcttaa

SEQ ID NO: 13537 - DNA, 21 bp, Homo sapiens
tacaagattggtcaactcaaa

SEQ ID NO: 13538 - DNA, 21 bp, Homo sapiens
atgcagtacaagattggtcaa

SEQ ID NO: 13539 - DNA, 21 bp, Homo sapiens
ccgcatcctgatccgcaacaa

SEQ ID NO: 13540 - DNA, 21 bp, Homo sapiens
ccggctggtgctgctgttctt

SEQ ID NO: 13541 - DNA, 21 bp, Homo sapiens
agcccagaggttcgagatcaa

SEQ ID NO: 13542 - DNA, 21 bp, Homo sapiens
ctcaaggacatgccaaagaaa

SEQ ID NO: 13543 - DNA, 21 bp, Homo sapiens
tagcaattagctcataatcaa

SEQ ID NO: 13544 - DNA, 21 bp, Homo sapiens
aaggagatacattaaatgcaa

SEQ ID NO: 13545 - DNA, 21 bp, Homo sapiens
ttcgtttgtactcatactcaa

SEQ ID NO: 13546 - DNA, 21 bp, Homo sapiens
cagagtttctcttgcccttaa

SEQ ID NO: 13547 - DNA, 21 bp, Homo sapiens
cacggaagactgaagcagaaa

SEQ ID NO: 13548 - DNA, 21 bp, Homo sapiens
cagagatgatggagatgtcaa

SEQ ID NO: 13549 - DNA, 21 bp, Homo sapiens
caccggcgtcattcagctgta

SEQ ID NO: 13550 - DNA, 21 bp, Homo sapiens
aaggagcacctgaaattgtga

SEQ ID NO: 13551 - DNA, 21 bp, Homo sapiens
aaggtgtgggacccaaggcaa

SEQ ID NO: 13552 - DNA, 21 bp, Homo sapiens
acggtgggagacaaacatcaa

SEQ ID NO: 13553 - DNA, 21 bp, Homo sapiens
acccatgatgccatacctaca

SEQ ID NO: 13554 - DNA, 21 bp, Homo sapiens
aagccgaagctcagagaggaa

SEQ ID NO: 13555 - DNA, 21 bp, Homo sapiens
ctaagtcattcccaaattaaa

SEQ ID NO: 13556 - DNA, 21 bp, Homo sapiens
caggatgtggcttctcatgaa

SEQ ID NO: 13557 - DNA, 21 bp, Homo sapiens
atgggaagggtagaaattaca

SEQ ID NO: 13558 - DNA, 21 bp, Homo sapiens
atcatttgctgtaatccttaa

SEQ ID NO: 13559 - DNA, 21 bp, Homo sapiens
cacgggagttgtgtccacaaa

SEQ ID NO: 13560 - DNA, 21 bp, Homo sapiens
caggacggttctcattattta

SEQ ID NO: 13561 - DNA, 21 bp, Homo sapiens
ccggaggaatttaactttgca

SEQ ID NO: 13562 - DNA, 21 bp, Homo sapiens
aacattggcatcagaatcaaa

SEQ ID NO: 13563 - DNA, 21 bp, Homo sapiens
caggctcacctgtatccagaa

SEQ ID NO: 13564 - DNA, 21 bp, Homo sapiens
cagcgacaacttcgagggcta

SEQ ID NO: 13565 - DNA, 21 bp, Homo sapiens
ctggagaataataacaactat

SEQ ID NO: 13566 - DNA, 21 bp, Homo sapiens
cagcaataaactcaccaacta

SEQ ID NO: 13567 - DNA, 21 bp, Homo sapiens
ctgaagaacgatccagagaaa

SEQ ID NO: 13568 - DNA, 21 bp, Homo sapiens
cagagattacacagagcaata

SEQ ID NO: 13569 - DNA, 21 bp, Homo sapiens
accgacggaaatacatcttta

SEQ ID NO: 13570 - DNA, 21 bp, Homo sapiens
cacccagggaataacaactta

SEQ ID NO: 13571 - DNA, 21 bp, Homo sapiens
aagccggtgtacaagaactta

SEQ ID NO: 13572 - DNA, 21 bp, Homo sapiens
agcagctaagatcttatccta

SEQ ID NO: 13573 - DNA, 21 bp, Homo sapiens
ccagacgaagatccaggcaaa

SEQ ID NO: 13574 - DNA, 21 bp, Homo sapiens
gtggagaagatctacagcaaa

SEQ ID NO: 13575 - DNA, 21 bp, Homo sapiens
ccaacgggcgttagcagataa

SEQ ID NO: 13576 - DNA, 21 bp, Homo sapiens
cagggtcgatgtggaaacata

SEQ ID NO: 13577 - DNA, 21 bp, Homo sapiens
cacgaatccctacatggtata

SEQ ID NO: 13578 - DNA, 21 bp, Homo sapiens
agggtcgatgtggaaacataa

SEQ ID NO: 13579 - DNA, 21 bp, Homo sapiens
caggccctggaggccaataaa

SEQ ID NO: 13580 - DNA, 21 bp, Homo sapiens
ccggatgctgagtaccctgaa

SEQ ID NO: 13581 - DNA, 21 bp, Homo sapiens
ctccagcatagttgagatcaa

SEQ ID NO: 13582 - DNA, 21 bp, Homo sapiens
cagcggtttattggaaagcca

SEQ ID NO: 13583 - DNA, 21 bp, Homo sapiens
acggctacatctagaaggcaa

SEQ ID NO: 13584 - DNA, 21 bp, Homo sapiens
acaccctggtattgaaagaaa

SEQ ID NO: 13585 - DNA, 21 bp, Homo sapiens
cagagaagagctcgccatgaa

SEQ ID NO: 13586 - DNA, 21 bp, Homo sapiens
ccggacgacgttcactcttca

SEQ ID NO: 13587 - DNA, 21 bp, Homo sapiens
ctggttaatgtttaagttaaa

SEQ ID NO: 13588 - DNA, 21 bp, Homo sapiens
taccagatttgagtcactaaa

SEQ ID NO: 13589 - DNA, 21 bp, Homo sapiens
ccgaagaactcggagcattta

SEQ ID NO: 13590 - DNA, 21 bp, Homo sapiens
atcaatgtcaacacatattta

SEQ ID NO: 13591 - DNA, 21 bp, Homo sapiens
ctgggaaatgattattacata

SEQ ID NO: 13592 - DNA, 21 bp, Homo sapiens
ctccaggatacataaattcaa

SEQ ID NO: 13593 - DNA, 21 bp, Homo sapiens
ctgagatacgttacccaatta

SEQ ID NO: 13594 - DNA, 21 bp, Homo sapiens
aagactggtggacaagtgtaa

SEQ ID NO: 13595 - DNA, 21 bp, Homo sapiens
caccaatatgtaattctatta

SEQ ID NO: 13596 - DNA, 21 bp, Homo sapiens
cagctgtgtaaagaagtctaa

SEQ ID NO: 13597 - DNA, 21 bp, Homo sapiens
tggcagcatgcccgagctgaa

SEQ ID NO: 13598 - DNA, 21 bp, Homo sapiens
actctggtttctgagaataaa

SEQ ID NO: 13599 - DNA, 21 bp, Homo sapiens
ctggagcagacggtgaccaaa

SEQ ID NO: 13600 - DNA, 21 bp, Homo sapiens
cacgagcagctggaagcgtat

SEQ ID NO: 13601 - DNA, 21 bp, Homo sapiens
caggagagcagccaacgagaa

SEQ ID NO: 13602 - DNA, 21 bp, Homo sapiens
ctcactattctatgccttaaa

SEQ ID NO: 13603 - DNA, 21 bp, Homo sapiens
caggtacatgctgctgctgct

SEQ ID NO: 13604 - DNA, 21 bp, Homo sapiens
ccggtggagacgatcagacat

SEQ ID NO: 13605 - DNA, 21 bp, Homo sapiens
cccggtggagacgatcagaca

SEQ ID NO: 13606 - DNA, 21 bp, Homo sapiens
ccggatgcagatgctgatgaa

SEQ ID NO: 13607 - DNA, 21 bp, Homo sapiens
tcgcaactttgtcaactacaa

SEQ ID NO: 13608 - DNA, 21 bp, Homo sapiens
ccggctatacaaggatcagaa

SEQ ID NO: 13609 - DNA, 21 bp, Homo sapiens
atcggtttcttcagtgcctta

SEQ ID NO: 13610 - DNA, 21 bp, Homo sapiens
ttggtgagaaatgaaatacaa

SEQ ID NO: 13611 - DNA, 21 bp, Homo sapiens
ttgagatgtgctcaatgtata

SEQ ID NO: 13612 - DNA, 21 bp, Homo sapiens
cagctgttgagtgagctgcta

SEQ ID NO: 13613 - DNA, 21 bp, Homo sapiens
ctacactttctctaaatatta

SEQ ID NO: 13614 - DNA, 21 bp, Homo sapiens
taggaagttctgatctgttaa

SEQ ID NO: 13615 - DNA, 21 bp, Homo sapiens
aagaacttaatgtgtaattaa

SEQ ID NO: 13616 - DNA, 21 bp, Homo sapiens
agcgatgtgctgtgaaatcta

SEQ ID NO: 13617 - DNA, 21 bp, Homo sapiens
cccgatgtcatcaagttgcaa

SEQ ID NO: 13618 - DNA, 21 bp, Homo sapiens
atggatgatattgtggttgta

SEQ ID NO: 13619 - DNA, 21 bp, Homo sapiens
ctgcaattggtcacaactatt

SEQ ID NO: 13620 - DNA, 21 bp, Homo sapiens
tcctgtgatttcatccaacta

SEQ ID NO: 13621 - DNA, 21 bp, Homo sapiens
taggctccattctgccatcta

SEQ ID NO: 13622 - DNA, 21 bp, Homo sapiens
atgggcaggtgtcacaaagaa

SEQ ID NO: 13623 - DNA, 21 bp, Homo sapiens
ctggaccagtttggtattaga

SEQ ID NO: 13624 - DNA, 21 bp, Homo sapiens
ccctaagggctcacaaccaaa

SEQ ID NO: 13625 - DNA, 21 bp, Homo sapiens
ccggtttgataagccaaagaa

SEQ ID NO: 13626 - DNA, 21 bp, Homo sapiens
cacggaaatgtttgctccttt

SEQ ID NO: 13627 - DNA, 21 bp, Homo sapiens
caaagtagctaaggcactaaa

SEQ ID NO: 13628 - DNA, 21 bp, Homo sapiens
atgagcaatatttctttctta

SEQ ID NO: 13629 - DNA, 21 bp, Homo sapiens
tggcatattgttggtgcataa

SEQ ID NO: 13630 - DNA, 21 bp, Homo sapiens
cacattgtgagtatatgaata

SEQ ID NO: 13631 - DNA, 21 bp, Homo sapiens
aagtacgactgtagttatcta

SEQ ID NO: 13632 - DNA, 21 bp, Homo sapiens
tcccatgggattattctctat

SEQ ID NO: 13633 - DNA, 21 bp, Homo sapiens
cagcagggtatttaagtgcta

SEQ ID NO: 13634 - DNA, 21 bp, Homo sapiens
atgctcaagagtcacattaaa

SEQ ID NO: 13635 - DNA, 21 bp, Homo sapiens
cagctgataagtattgggtaa

SEQ ID NO: 13636 - DNA, 21 bp, Homo sapiens
caggctgtcttctttcatcaa

SEQ ID NO: 13637 - DNA, 21 bp, Homo sapiens
cagattgtggtggaagttata

SEQ ID NO: 13638 - DNA, 21 bp, Homo sapiens
aaaggtgtttataaagaataa

SEQ ID NO: 13639 - DNA, 21 bp, Homo sapiens
atggtgagatttagcacatat

SEQ ID NO: 13640 - DNA, 21 bp, Homo sapiens
aaggatcaggccctcacagaa

SEQ ID NO: 13641 - DNA, 21 bp, Homo sapiens
ccgcttattactcctatgcat

SEQ ID NO: 13642 - DNA, 21 bp, Homo sapiens
cacactgaacatgtaataaga

SEQ ID NO: 13643 - DNA, 21 bp, Homo sapiens
atccatatgaaggaaaggtta

SEQ ID NO: 13644 - DNA, 21 bp, Homo sapiens
atggaccaagtggaaggcaaa

SEQ ID NO: 13645 - DNA, 21 bp, Homo sapiens
caggaatacagccaagggaaa

SEQ ID NO: 13646 - DNA, 21 bp, Homo sapiens
cagcttcacaatggccatgaa

SEQ ID NO: 13647 - DNA, 21 bp, Homo sapiens
cagcatagcctcggcctagga

SEQ ID NO: 13648 - DNA, 21 bp, Homo sapiens
cagcgggagtgcgtggccaaa

SEQ ID NO: 13649 - DNA, 21 bp, Homo sapiens
acggcttgtcttgggaaccaa

SEQ ID NO: 13650 - DNA, 21 bp, Homo sapiens
caggaattcagcaacctggaa

SEQ ID NO: 13651 - DNA, 21 bp, Homo sapiens
caggtgtgtactgtccttgta

SEQ ID NO: 13652 - DNA, 21 bp, Homo sapiens
ctggctgaaaggaaagtcata

SEQ ID NO: 13653 - DNA, 21 bp, Homo sapiens
accaccttacttggccatgaa

SEQ ID NO: 13654 - DNA, 21 bp, Homo sapiens
ctgcatgctatccaccattga

SEQ ID NO: 13655 - DNA, 21 bp, Homo sapiens
cggcacatccacatccttcta

SEQ ID NO: 13656 - DNA, 21 bp, Homo sapiens
aagcagctgtcttatggcata

SEQ ID NO: 13657 - DNA, 21 bp, Homo sapiens
gaagatctgtttataaactaa

SEQ ID NO: 13658 - DNA, 21 bp, Homo sapiens
cacccacaacatactctgtta

SEQ ID NO: 13659 - DNA, 21 bp, Homo sapiens
tacgatgtgagcataagtgaa

SEQ ID NO: 13660 - DNA, 21 bp, Homo sapiens
ccgatagatgtggaatacaaa

SEQ ID NO: 13661 - DNA, 21 bp, Homo sapiens
caccatgctcggaacctgtaa

SEQ ID NO: 13662 - DNA, 21 bp, Homo sapiens
tgcaaactaaaggaaacttta

SEQ ID NO: 13663 - DNA, 21 bp, Homo sapiens
gaggctaaagagaagcatcaa

SEQ ID NO: 13664 - DNA, 21 bp, Homo sapiens
aacagtgggaacgacaaacaa

SEQ ID NO: 13665 - DNA, 21 bp, Homo sapiens
cacactctactacgtctagaa

SEQ ID NO: 13666 - DNA, 21 bp, Homo sapiens
atccattgagatacccgtcta

SEQ ID NO: 13667 - DNA, 21 bp, Homo sapiens
ctgtgataatttcacccttaa

SEQ ID NO: 13668 - DNA, 21 bp, Homo sapiens
aagagctgtgcttagattcaa

SEQ ID NO: 13669 - DNA, 21 bp, Homo sapiens
agggattcagagtttatctta

SEQ ID NO: 13670 - DNA, 21 bp, Homo sapiens
aaacctgaatatggcaaccaa

SEQ ID NO: 13671 - DNA, 21 bp, Homo sapiens
caggatatgaaatgatttcaa

SEQ ID NO: 13672 - DNA, 21 bp, Homo sapiens
cagcatctctctgaaacgaaa

SEQ ID NO: 13673 - DNA, 21 bp, Homo sapiens
gaggagttagctgcatttaaa

SEQ ID NO: 13674 - DNA, 21 bp, Homo sapiens
caggcttattagaatgaacta

SEQ ID NO: 13675 - DNA, 21 bp, Homo sapiens
cagcacagccatcgacattaa

SEQ ID NO: 13676 - DNA, 21 bp, Homo sapiens
ccgcagcacagtgctaatcta

SEQ ID NO: 13677 - DNA, 21 bp, Homo sapiens
ctggttctttgggctgatcaa

SEQ ID NO: 13678 - DNA, 21 bp, Homo sapiens
ctcagtttagtctgtgggcaa

SEQ ID NO: 13679 - DNA, 21 bp, Homo sapiens
ctggttctttgggctgatcaa

SEQ ID NO: 13680 - DNA, 21 bp, Homo sapiens
agctatgttctcttacatgaa

SEQ ID NO: 13681 - DNA, 21 bp, Homo sapiens
aacgtgaagctgctaccgaaa

SEQ ID NO: 13682 - DNA, 21 bp, Homo sapiens
atgaagttggtggattggtaa

SEQ ID NO: 13683 - DNA, 21 bp, Homo sapiens
ctcagtatacttcaatcccta

SEQ ID NO: 13684 - DNA, 21 bp, Homo sapiens
ctgaaataacgtattatgttt

SEQ ID NO: 13685 - DNA, 21 bp, Homo sapiens
cagaatgtctgggcgaggtaa

SEQ ID NO: 13686 - DNA, 21 bp, Homo sapiens
cagcttctctacagactccaa

SEQ ID NO: 13687 - DNA, 21 bp, Homo sapiens
aacaacctgcataataaataa

SEQ ID NO: 13688 - DNA, 21 bp, Homo sapiens
ctggtggacagtggtatgaaa

SEQ ID NO: 13689 - DNA, 21 bp, Homo sapiens
ccggtatgagatgctccttaa

SEQ ID NO: 13690 - DNA, 21 bp, Homo sapiens
cagagtcattctaccgataaa

SEQ ID NO: 13691 - DNA, 21 bp, Homo sapiens
cagcagcaagttagggctgaa

SEQ ID NO: 13692 - DNA, 21 bp, Homo sapiens
atgatgtaacagggacaataa

SEQ ID NO: 13693 - DNA, 21 bp, Homo sapiens
cacatatgtgttcagggtgga

SEQ ID NO: 13694 - DNA, 21 bp, Homo sapiens
ctgcgactcgaggccacccaa

SEQ ID NO: 13695 - DNA, 21 bp, Homo sapiens
ctgcgtttggagaatcatcaa

SEQ ID NO: 13696 - DNA, 21 bp, Homo sapiens
acgggaagagatgactgacaa

SEQ ID NO: 13697 - DNA, 21 bp, Homo sapiens
caggctttatttaaaggataa

SEQ ID NO: 13698 - DNA, 21 bp, Homo sapiens
caagttatctctgaaatttaa

SEQ ID NO: 13699 - DNA, 21 bp, Homo sapiens
ccaggtgatgttataaataaa

SEQ ID NO: 13700 - DNA, 21 bp, Homo sapiens
aaggaggatcttcttggcaaa

SEQ ID NO: 13701 - DNA, 21 bp, Homo sapiens
aagacactgcagagattccat

SEQ ID NO: 13702 - DNA, 21 bp, Homo sapiens
cagtaaagatctgttgaataa

SEQ ID NO: 13703 - DNA, 21 bp, Homo sapiens
tggcattgctgtcaacattaa

SEQ ID NO: 13704 - DNA, 21 bp, Homo sapiens
caagaagatgacattcactta

SEQ ID NO: 13705 - DNA, 21 bp, Homo sapiens
tccagcatgactagaatataa

SEQ ID NO: 13706 - DNA, 21 bp, Homo sapiens
cacccttaatctgggtaggaa

SEQ ID NO: 13707 - DNA, 21 bp, Homo sapiens
caggagttatttattatcttt

SEQ ID NO: 13708 - DNA, 21 bp, Homo sapiens
taggttgaattaacattacaa

SEQ ID NO: 13709 - DNA, 21 bp, Homo sapiens
caggaaatgacctgacctcaa

SEQ ID NO: 13710 - DNA, 21 bp, Homo sapiens
aacactcagagggacggtcaa

SEQ ID NO: 13711 - DNA, 21 bp, Homo sapiens
ctccatcttcttcatcttgaa

SEQ ID NO: 13712 - DNA, 21 bp, Homo sapiens
ccgcatcatcatgattcttta

SEQ ID NO: 13713 - DNA, 21 bp, Homo sapiens
accgttaaccattgacaggta

SEQ ID NO: 13714 - DNA, 21 bp, Homo sapiens
aagaattgtcgtgcacctcaa

SEQ ID NO: 13715 - DNA, 21 bp, Homo sapiens
aagaacgaattccaaaccaaa

SEQ ID NO: 13716 - DNA, 21 bp, Homo sapiens
caccatgttctcccgtctcaa

SEQ ID NO: 13717 - DNA, 21 bp, Homo sapiens
agccctagaatgggtgaggaa

SEQ ID NO: 13718 - DNA, 21 bp, Homo sapiens
tttctcaggtgtgaatcaact

SEQ ID NO: 13719 - DNA, 21 bp, Homo sapiens
tgaaggccttgtgctgaccaa

SEQ ID NO: 13720 - DNA, 21 bp, Homo sapiens
ggacaactggtccttatcaca

SEQ ID NO: 13721 - DNA, 21 bp, Homo sapiens
cagtactggcagaaccagaaa

SEQ ID NO: 13722 - DNA, 21 bp, Homo sapiens
ctggctgcatgggacccataa

SEQ ID NO: 13723 - DNA, 21 bp, Homo sapiens
tcggcaaagctgccaaatgaa

SEQ ID NO: 13724 - DNA, 21 bp, Homo sapiens
caggaagacatacagttgaaa

SEQ ID NO: 13725 - DNA, 21 bp, Homo sapiens
tagaaatattacagagatcta

SEQ ID NO: 13726 - DNA, 21 bp, Homo sapiens
taggaatatgaaactaattaa

SEQ ID NO: 13727 - DNA, 21 bp, Homo sapiens
ccggctggtttgagagtgaca

SEQ ID NO: 13728 - DNA, 21 bp, Homo sapiens
ctcaccaatttgcttaaatta

SEQ ID NO: 13729 - DNA, 21 bp, Homo sapiens
ctggatggcgttatgatttca

SEQ ID NO: 13730 - DNA, 21 bp, Homo sapiens
accaatttgcttaaattagta

SEQ ID NO: 13731 - DNA, 21 bp, Homo sapiens
cggccgggccaagaacattaa

SEQ ID NO: 13732 - DNA, 21 bp, Homo sapiens
caccgaagtctccaccatcaa

SEQ ID NO: 13733 - DNA, 21 bp, Homo sapiens
ccgggagaagtcctacctgtt

SEQ ID NO: 13734 - DNA, 21 bp, Homo sapiens
ccgggtcaagaacatcttgca

SEQ ID NO: 13735 - DNA, 21 bp, Homo sapiens
ccggagcatccgcatcattaa

SEQ ID NO: 13736 - DNA, 21 bp, Homo sapiens
caggaagatgggatttacaaa

SEQ ID NO: 13737 - DNA, 21 bp, Homo sapiens
caaggccttaatggacattga

SEQ ID NO: 13738 - DNA, 21 bp, Homo sapiens
acgatggtgactgccacataa

SEQ ID NO: 13739 - DNA, 21 bp, Homo sapiens
ccggagtttcacggaggagaa

SEQ ID NO: 13740 - DNA, 21 bp, Homo sapiens
aacgaggagtctgactttgaa

SEQ ID NO: 13741 - DNA, 21 bp, Homo sapiens
aaggagcagaaacataatcaa

SEQ ID NO: 13742 - DNA, 21 bp, Homo sapiens
accacattaaattgtaaataa

SEQ ID NO: 13743 - DNA, 21 bp, Homo sapiens
cagcaacattacagtcttgaa

SEQ ID NO: 13744 - DNA, 21 bp, Homo sapiens
cagcaagtgctttcatccaaa

SEQ ID NO: 13745 - DNA, 21 bp, Homo sapiens
cccaagtagactggacacaaa

SEQ ID NO: 13746 - DNA, 21 bp, Homo sapiens
caccaagacacagaagttcaa

SEQ ID NO: 13747 - DNA, 21 bp, Homo sapiens
tcggtgctaattcctttgtaa

SEQ ID NO: 13748 - DNA, 21 bp, Homo sapiens
cccgctctacctgatctgcta

SEQ ID NO: 13749 - DNA, 21 bp, Homo sapiens
cagggacatctttgcaagcca

SEQ ID NO: 13750 - DNA, 21 bp, Homo sapiens
gacgatagaaacctaaggaaa

SEQ ID NO: 13751 - DNA, 21 bp, Homo sapiens
cacagcatccttgacagctaa

SEQ ID NO: 13752 - DNA, 21 bp, Homo sapiens
cccggtgctgttcgtcgtcta

SEQ ID NO: 13753 - DNA, 21 bp, Homo sapiens
atgggtgttcgtgcccatcta

SEQ ID NO: 13754 - DNA, 21 bp, Homo sapiens
cagcgggcaactcttcatcta

SEQ ID NO: 13755 - DNA, 21 bp, Homo sapiens
aaggtgtttgacaagaagata

SEQ ID NO: 13756 - DNA, 21 bp, Homo sapiens
ctggaagaacctgaaacaaat

SEQ ID NO: 13757 - DNA, 21 bp, Homo sapiens
caccgtgaagaatgcgtggaa

SEQ ID NO: 13758 - DNA, 21 bp, Homo sapiens
aagtctcaaggtctccagtaa

SEQ ID NO: 13759 - DNA, 21 bp, Homo sapiens
acggacctttgctgaattaaa

SEQ ID NO: 13760 - DNA, 21 bp, Homo sapiens
ccagcactccatgaagataaa

SEQ ID NO: 13761 - DNA, 21 bp, Homo sapiens
ctgtgtggtctccttgttcta

SEQ ID NO: 13762 - DNA, 21 bp, Homo sapiens
ctcagattgtctcctccttaa

SEQ ID NO: 13763 - DNA, 21 bp, Homo sapiens
ctgctctaacaccctcctcaa

SEQ ID NO: 13764 - DNA, 21 bp, Homo sapiens
acagatcgtgtagaagagaaa

SEQ ID NO: 13765 - DNA, 21 bp, Homo sapiens
caggaagctggtcaacagaaa

SEQ ID NO: 13766 - DNA, 21 bp, Homo sapiens
cagcgtcataatcgccatgat

SEQ ID NO: 13767 - DNA, 21 bp, Homo sapiens
cacgaacattacttcaatcaa

SEQ ID NO: 13768 - DNA, 21 bp, Homo sapiens
ctggaacttaacatcactcaa

SEQ ID NO: 13769 - DNA, 21 bp, Homo sapiens
aaggagtagctgaaaggaaga

SEQ ID NO: 13770 - DNA, 21 bp, Homo sapiens
cccgctgtgccctgtgctgta

SEQ ID NO: 13771 - DNA, 21 bp, Homo sapiens
cccagcttcataccaccctaa

SEQ ID NO: 13772 - DNA, 21 bp, Homo sapiens
aaggtagtagtgagacgtgaa

SEQ ID NO: 13773 - DNA, 21 bp, Homo sapiens
aaggccaagaagcctgcatta

SEQ ID NO: 13774 - DNA, 21 bp, Homo sapiens
ctagaaggccctttcatcaat

SEQ ID NO: 13775 - DNA, 21 bp, Homo sapiens
cccaatcaatatgttgtttat

SEQ ID NO: 13776 - DNA, 21 bp, Homo sapiens
cagggacatatgcagatccaa

SEQ ID NO: 13777 - DNA, 21 bp, Homo sapiens
ctactacaacctggactccaa

SEQ ID NO: 13778 - DNA, 21 bp, Homo sapiens
accggcaactatgatgtcaat

SEQ ID NO: 13779 - DNA, 21 bp, Homo sapiens
ctgggaaaggccagcacttca

SEQ ID NO: 13780 - DNA, 21 bp, Homo sapiens
ctgccgctgctgcctcaataa

SEQ ID NO: 13781 - DNA, 21 bp, Homo sapiens
aagcctgaacacagaaattca

SEQ ID NO: 13782 - DNA, 21 bp, Homo sapiens
caggagtctgtgtgggatgaa

SEQ ID NO: 13783 - DNA, 21 bp, Homo sapiens
ccggctgtcctgcctctccaa

SEQ ID NO: 13784 - DNA, 21 bp, Homo sapiens
cccaataaactctctgaccaa

SEQ ID NO: 13785 - DNA, 21 bp, Homo sapiens
caggaaatgggtgttaggtaa

SEQ ID NO: 13786 - DNA, 21 bp, Homo sapiens
ctgagatacttggaaatacaa

SEQ ID NO: 13787 - DNA, 21 bp, Homo sapiens
cccaaactgccctgaaataaa

SEQ ID NO: 13788 - DNA, 21 bp, Homo sapiens
ttccgtttctatcttccttta

SEQ ID NO: 13789 - DNA, 21 bp, Homo sapiens
caccgtggacgtggagaacaa

SEQ ID NO: 13790 - DNA, 21 bp, Homo sapiens
aaggacaagatttgacttaaa

SEQ ID NO: 13791 - DNA, 21 bp, Homo sapiens
caccttggtagaaatggcaaa

SEQ ID NO: 13792 - DNA, 21 bp, Homo sapiens
ttggagctgaaggaaagatta

SEQ ID NO: 13793 - DNA, 21 bp, Homo sapiens
cgggagctggccctaaagcaa

SEQ ID NO: 13794 - DNA, 21 bp, Homo sapiens
aaggacctgagtgcaagtaat

SEQ ID NO: 13795 - DNA, 21 bp, Homo sapiens
ctggacaacatgcaccatgta

SEQ ID NO: 13796 - DNA, 21 bp, Homo sapiens
caagagaagatgagtgattat

SEQ ID NO: 13797 - DNA, 21 bp, Homo sapiens
ctggatctcaataaggagata

SEQ ID NO: 13798 - DNA, 21 bp, Homo sapiens
cgaggtcaaggtcaccattaa

SEQ ID NO: 13799 - DNA, 21 bp, Homo sapiens
ctggttcatgacttcacagaa

SEQ ID NO: 13800 - DNA, 21 bp, Homo sapiens
aaggagttgtctgatgaggaa

SEQ ID NO: 13801 - DNA, 21 bp, Homo sapiens
ctcagccaccattgcaccaaa

SEQ ID NO: 13802 - DNA, 21 bp, Homo sapiens
aagccggaggtcataatgtat

SEQ ID NO: 13803 - DNA, 21 bp, Homo sapiens
aaggaaatatacagaagacaa

SEQ ID NO: 13804 - DNA, 21 bp, Homo sapiens
caccaatatatatgcctttaa

SEQ ID NO: 13805 - DNA, 21 bp, Homo sapiens
ttggcagttggaagctcttaa

SEQ ID NO: 13806 - DNA, 21 bp, Homo sapiens
ccgctaggagagcaagcacaa

SEQ ID NO: 13807 - DNA, 21 bp, Homo sapiens
cccgtctctcacgtactttaa

SEQ ID NO: 13808 - DNA, 21 bp, Homo sapiens
cccgctgctgcccgtgtttaa

SEQ ID NO: 13809 - DNA, 21 bp, Homo sapiens
atggaagcatctacacattaa

SEQ ID NO: 13810 - DNA, 21 bp, Homo sapiens
caaatgcttattaaatttcaa

SEQ ID NO: 13811 - DNA, 21 bp, Homo sapiens
ccggaggactatttcaaatta

SEQ ID NO: 13812 - DNA, 21 bp, Homo sapiens
ctcaagattattaaacattta

SEQ ID NO: 13813 - DNA, 21 bp, Homo sapiens
aaccaagacattagatttcaa

SEQ ID NO: 13814 - DNA, 21 bp, Homo sapiens
aaggcattggatcaacacaaa

SEQ ID NO: 13815 - DNA, 21 bp, Homo sapiens
ctctatggatgcaatcattga

SEQ ID NO: 13816 - DNA, 21 bp, Homo sapiens
actcaggaaagtgttaggaaa

SEQ ID NO: 13817 - DNA, 21 bp, Homo sapiens
aacaatgagtaaatctactaa

SEQ ID NO: 13818 - DNA, 21 bp, Homo sapiens
aacctcgacttcactgaaata

SEQ ID NO: 13819 - DNA, 21 bp, Homo sapiens
ctactgcaatatggaatctta

SEQ ID NO: 13820 - DNA, 21 bp, Homo sapiens
accatcaggaatcaactatta

SEQ ID NO: 13821 - DNA, 21 bp, Homo sapiens
caccattgcagtggccattta

SEQ ID NO: 13822 - DNA, 21 bp, Homo sapiens
ccggcagcaacgagccattaa

SEQ ID NO: 13823 - DNA, 21 bp, Homo sapiens
aggcctgatatttatctccta

SEQ ID NO: 13824 - DNA, 21 bp, Homo sapiens
atcaatgagataataaattat

SEQ ID NO: 13825 - DNA, 21 bp, Homo sapiens
caggctcatttgggaatttat

SEQ ID NO: 13826 - DNA, 21 bp, Homo sapiens
cccaatttaaacatagaacaa

SEQ ID NO: 13827 - DNA, 21 bp, Homo sapiens
caggtggtcctgacggtgcaa

SEQ ID NO: 13828 - DNA, 21 bp, Homo sapiens
cccaagagcagggcaaattta

SEQ ID NO: 13829 - DNA, 21 bp, Homo sapiens
accgctgtgaatgacaccata

SEQ ID NO: 13830 - DNA, 21 bp, Homo sapiens
aagccttatcctcggaagtaa

SEQ ID NO: 13831 - DNA, 21 bp, Homo sapiens
atggatcatggttatgtttaa

SEQ ID NO: 13832 - DNA, 21 bp, Homo sapiens
ttggcttcatttcaaacttta

SEQ ID NO: 13833 - DNA, 21 bp, Homo sapiens
caccaggacttgagcacataa

SEQ ID NO: 13834 - DNA, 21 bp, Homo sapiens
ctggtaaataaccacagtgta

SEQ ID NO: 13835 - DNA, 21 bp, Homo sapiens
ccgattcatgctggaatccaa

SEQ ID NO: 13836 - DNA, 21 bp, Homo sapiens
agccatttcagtagcactaaa

SEQ ID NO: 13837 - DNA, 21 bp, Homo sapiens
ttgagccaaatgcaactttaa

SEQ ID NO: 13838 - DNA, 21 bp, Homo sapiens
tgggataatgctgcaatccaa

SEQ ID NO: 13839 - DNA, 21 bp, Homo sapiens
cacacggacctgagcaagcta

SEQ ID NO: 13840 - DNA, 21 bp, Homo sapiens
atggtaggacatggaccttga

SEQ ID NO: 13841 - DNA, 21 bp, Homo sapiens
gagcactaagaccaccttcta

SEQ ID NO: 13842 - DNA, 21 bp, Homo sapiens
ctccgtggttccgttgaagaa

SEQ ID NO: 13843 - DNA, 21 bp, Homo sapiens
gcgcccaagaagggttctaaa

SEQ ID NO: 13844 - DNA, 21 bp, Homo sapiens
ttggagagactcagccatcat

SEQ ID NO: 13845 - DNA, 21 bp, Homo sapiens
aagaacatcaacgatggcttt

SEQ ID NO: 13846 - DNA, 21 bp, Homo sapiens
caggtttgccctgcacaattt

SEQ ID NO: 13847 - DNA, 21 bp, Homo sapiens
cagcgtcaagagagtttgtaa

SEQ ID NO: 13848 - DNA, 21 bp, Homo sapiens
aagttggtaaataaacaggaa

SEQ ID NO: 13849 - DNA, 21 bp, Homo sapiens
ctggtaagacttgacctttat

SEQ ID NO: 13850 - DNA, 21 bp, Homo sapiens
aagcaagatagttacaagaaa

SEQ ID NO: 13851 - DNA, 21 bp, Homo sapiens
acggaaggaatacagccgaaa

SEQ ID NO: 13852 - DNA, 21 bp, Homo sapiens
ctgcttgtagatggatgaaat

SEQ ID NO: 13853 - DNA, 21 bp, Homo sapiens
ccgaaataagatcacacacat

SEQ ID NO: 13854 - DNA, 21 bp, Homo sapiens
ctggagggtattaaagagaca

SEQ ID NO: 13855 - DNA, 21 bp, Homo sapiens
caccacgattgtgacagcgta

SEQ ID NO: 13856 - DNA, 21 bp, Homo sapiens
acgggcctggagggtattaaa

SEQ ID NO: 13857 - DNA, 21 bp, Homo sapiens
cccggactttctggccatgaa

SEQ ID NO: 13858 - DNA, 21 bp, Homo sapiens
ctgtagcttatcccaagtcaa

SEQ ID NO: 13859 - DNA, 21 bp, Homo sapiens
cctggtcaatgtgaagactaa

SEQ ID NO: 13860 - DNA, 21 bp, Homo sapiens
ctggctgagctggacatagta

SEQ ID NO: 13861 - DNA, 21 bp, Homo sapiens
cagcaggtgtttgttgggcca

SEQ ID NO: 13862 - DNA, 21 bp, Homo sapiens
caacgagtgcatggatggaaa

SEQ ID NO: 13863 - DNA, 21 bp, Homo sapiens
ctggatgtgctcaacaataaa

SEQ ID NO: 13864 - DNA, 21 bp, Homo sapiens
caggagtaggcttgtatttaa

SEQ ID NO: 13865 - DNA, 21 bp, Homo sapiens
acggactttgcttaaatccta

SEQ ID NO: 13866 - DNA, 21 bp, Homo sapiens
caggtgagaattcttgagcaa

SEQ ID NO: 13867 - DNA, 21 bp, Homo sapiens
aaggaagttcatgtcaataaa

SEQ ID NO: 13868 - DNA, 21 bp, Homo sapiens
aaggctaaactagaagtgaaa

SEQ ID NO: 13869 - DNA, 21 bp, Homo sapiens
ctcaaatgttacacagataaa

SEQ ID NO: 13870 - DNA, 21 bp, Homo sapiens
caggtttcccagacaactgaa

SEQ ID NO: 13871 - DNA, 21 bp, Homo sapiens
catgactttattgtctttcaa

SEQ ID NO: 13872 - DNA, 21 bp, Homo sapiens
cagcagaactgtggacagcaa

SEQ ID NO: 13873 - DNA, 21 bp, Homo sapiens
cagaatggctttgacaaatta

SEQ ID NO: 13874 - DNA, 21 bp, Homo sapiens
acggttagatttagttaccaa

SEQ ID NO: 13875 - DNA, 21 bp, Homo sapiens
aagtgtgaaacttgtgccata

SEQ ID NO: 13876 - DNA, 21 bp, Homo sapiens
cagcaaatagatattcctcta

SEQ ID NO: 13877 - DNA, 21 bp, Homo sapiens
cacagagtaatgaatatttaa

SEQ ID NO: 13878 - DNA, 21 bp, Homo sapiens
tactttggtaaacgagattta

SEQ ID NO: 13879 - DNA, 21 bp, Homo sapiens
cacattggacctcaaggcgaa

SEQ ID NO: 13880 - DNA, 21 bp, Homo sapiens
caggtcaaaccctcttgttta

SEQ ID NO: 13881 - DNA, 21 bp, Homo sapiens
aagacaaatggtgtccacaaa

SEQ ID NO: 13882 - DNA, 21 bp, Homo sapiens
aacggtgaactttggagtgaa

SEQ ID NO: 13883 - DNA, 21 bp, Homo sapiens
ctgaatgaagtcagatgtaaa

SEQ ID NO: 13884 - DNA, 21 bp, Homo sapiens
cacgagaaatattgtgaccaa

SEQ ID NO: 13885 - DNA, 21 bp, Homo sapiens
ccgaactgaggttgtgatgaa

SEQ ID NO: 13886 - DNA, 21 bp, Homo sapiens
cagcgtcagaggaaactaaca

SEQ ID NO: 13887 - DNA, 21 bp, Homo sapiens
caccaaggaggcatcgcaata

SEQ ID NO: 13888 - DNA, 21 bp, Homo sapiens
aatgttgatagacgaaatata

SEQ ID NO: 13889 - DNA, 21 bp, Homo sapiens
tcgcacgttatttgccatgta

SEQ ID NO: 13890 - DNA, 21 bp, Homo sapiens
ttggagcaaatctatcaatta

SEQ ID NO: 13891 - DNA, 21 bp, Homo sapiens
cagactttggtaacaatccaa

SEQ ID NO: 13892 - DNA, 21 bp, Homo sapiens
caagactatcaaacaaatcta

SEQ ID NO: 13893 - DNA, 21 bp, Homo sapiens
atcaatgaagctaaagattta

SEQ ID NO: 13894 - DNA, 21 bp, Homo sapiens
tagaatttatacactaataaa

SEQ ID NO: 13895 - DNA, 21 bp, Homo sapiens
taccctgatgcccatctctca

SEQ ID NO: 13896 - DNA, 21 bp, Homo sapiens
caccatggtggatggactgaa

SEQ ID NO: 13897 - DNA, 21 bp, Homo sapiens
tcggaggagcttctacgtgta

SEQ ID NO: 13898 - DNA, 21 bp, Homo sapiens
caagatcctcttctcctacaa

SEQ ID NO: 13899 - DNA, 21 bp, Homo sapiens
aaagccagtcatgtaactcta

SEQ ID NO: 13900 - DNA, 21 bp, Homo sapiens
acggaccagctggaaagatca

SEQ ID NO: 13901 - DNA, 21 bp, Homo sapiens
caggaaggtatcctccatgaa

SEQ ID NO: 13902 - DNA, 21 bp, Homo sapiens
ctcggcctgctgcatgcacaa

SEQ ID NO: 13903 - DNA, 21 bp, Homo sapiens
cccatcagaggcagcactcaa

SEQ ID NO: 13904 - DNA, 21 bp, Homo sapiens
ccggagtccgcggttactcaa

SEQ ID NO: 13905 - DNA, 21 bp, Homo sapiens
ctggagtttactacaattcat

SEQ ID NO: 13906 - DNA, 21 bp, Homo sapiens
atggtggttggagaagataaa

SEQ ID NO: 13907 - DNA, 21 bp, Homo sapiens
cagctggaaatggcaaatgaa

SEQ ID NO: 13908 - DNA, 21 bp, Homo sapiens
aaggttgcacagtgaattaaa

SEQ ID NO: 13909 - DNA, 21 bp, Homo sapiens
aagaatggtatttggaattaa

SEQ ID NO: 13910 - DNA, 21 bp, Homo sapiens
caagattgtctgagaaatgta

SEQ ID NO: 13911 - DNA, 21 bp, Homo sapiens
cagctttgagataaatgttaa

SEQ ID NO: 13912 - DNA, 21 bp, Homo sapiens
aaggctaagtgtagaagataa

SEQ ID NO: 13913 - DNA, 21 bp, Homo sapiens
aagcgtgtaataaataagtta

SEQ ID NO: 13914 - DNA, 21 bp, Homo sapiens
ctggctatttattataaagta

SEQ ID NO: 13915 - DNA, 21 bp, Homo sapiens
ctggagattggtggcagtaaa

SEQ ID NO: 13916 - DNA, 21 bp, Homo sapiens
ctgggtaatagtcaactaata

SEQ ID NO: 13917 - DNA, 21 bp, Homo sapiens
acgtacaaagactgagacaaa

SEQ ID NO: 13918 - DNA, 21 bp, Homo sapiens
gggctgtagtttggtcaatta

SEQ ID NO: 13919 - DNA, 21 bp, Homo sapiens
caacgataatgtgcagatcaa

SEQ ID NO: 13920 - DNA, 21 bp, Homo sapiens
ctgcagaaagttgaacatcaa

SEQ ID NO: 13921 - DNA, 21 bp, Homo sapiens
ctggacgatccagcaagataa

SEQ ID NO: 13922 - DNA, 21 bp, Homo sapiens
ttgggtgtctatgatttctta

SEQ ID NO: 13923 - DNA, 21 bp, Homo sapiens
aagaataacgatcccagataa

SEQ ID NO: 13924 - DNA, 21 bp, Homo sapiens
cgggaccagcataaatttcaa

SEQ ID NO: 13925 - DNA, 21 bp, Homo sapiens
cacactgacacttacaatgaa

SEQ ID NO: 13926 - DNA, 21 bp, Homo sapiens
ctcaatgtagttatttgctaa

SEQ ID NO: 13927 - DNA, 21 bp, Homo sapiens
ttggataacattagatccaaa

SEQ ID NO: 13928 - DNA, 21 bp, Homo sapiens
atggctgtactgtctattcaa

SEQ ID NO: 13929 - DNA, 21 bp, Homo sapiens
ccaactgtttgtagtatccta

SEQ ID NO: 13930 - DNA, 21 bp, Homo sapiens
cacatctttaactaaacttat

SEQ ID NO: 13931 - DNA, 21 bp, Homo sapiens
ctgggataatggtacacataa

SEQ ID NO: 13932 - DNA, 21 bp, Homo sapiens
cacctagtctttggtccataa

SEQ ID NO: 13933 - DNA, 21 bp, Homo sapiens
tggaaatggatgataaccaaa

SEQ ID NO: 13934 - DNA, 21 bp, Homo sapiens
agggaaggcttgaaaggtgta

SEQ ID NO: 13935 - DNA, 21 bp, Homo sapiens
ctccttcacaatgcttggaaa

SEQ ID NO: 13936 - DNA, 21 bp, Homo sapiens
ccgagctacggcgtactccaa

SEQ ID NO: 13937 - DNA, 21 bp, Homo sapiens
cagggtcagttcaagccttaa

SEQ ID NO: 13938 - DNA, 21 bp, Homo sapiens
caggcaagttgtagtcatcaa

SEQ ID NO: 13939 - DNA, 21 bp, Homo sapiens
cccagcagatcttcatctgta

SEQ ID NO: 13940 - DNA, 21 bp, Homo sapiens
ccagggtatcaacaggaacaa

SEQ ID NO: 13941 - DNA, 21 bp, Homo sapiens
ctggcagcgtttggaaactta

SEQ ID NO: 13942 - DNA, 21 bp, Homo sapiens
aagcatcaggctaggaagata

SEQ ID NO: 13943 - DNA, 21 bp, Homo sapiens
taaggactgattcgtcaacaa

SEQ ID NO: 13944 - DNA, 21 bp, Homo sapiens
catggtgtttatatacagtaa

SEQ ID NO: 13945 - DNA, 21 bp, Homo sapiens
atggatattgactatatgtaa

SEQ ID NO: 13946 - DNA, 21 bp, Homo sapiens
ctccatagcactgaaatttaa

SEQ ID NO: 13947 - DNA, 21 bp, Homo sapiens
aacaattattatactccttaa

SEQ ID NO: 13948 - DNA, 21 bp, Homo sapiens
ccggaaatcggcatcactaga

SEQ ID NO: 13949 - DNA, 21 bp, Homo sapiens
cacagtcaagttcacctcaaa

SEQ ID NO: 13950 - DNA, 21 bp, Homo sapiens
aactctcattatgttaaataa

SEQ ID NO: 13951 - DNA, 21 bp, Homo sapiens
caggaattccttatgtgtgaa

SEQ ID NO: 13952 - DNA, 21 bp, Homo sapiens
acggtactgaacagacaatta

SEQ ID NO: 13953 - DNA, 21 bp, Homo sapiens
accaatgtttacaaatatgta

SEQ ID NO: 13954 - DNA, 21 bp, Homo sapiens
caccatgaaatatgtcttcta

SEQ ID NO: 13955 - DNA, 21 bp, Homo sapiens
ccgctggaaggttaatcataa

SEQ ID NO: 13956 - DNA, 21 bp, Homo sapiens
cgggccctccagcaaattaaa

SEQ ID NO: 13957 - DNA, 21 bp, Homo sapiens
agggcttgagtgaaaggagaa

SEQ ID NO: 13958 - DNA, 21 bp, Homo sapiens
atggagggatttccgcttcaa

SEQ ID NO: 13959 - DNA, 21 bp, Homo sapiens
cagcgccaacaccatggacta

SEQ ID NO: 13960 - DNA, 21 bp, Homo sapiens
ccgggtgatgtctgatgaaga

SEQ ID NO: 13961 - DNA, 21 bp, Homo sapiens
tagctacatatcattgcataa

SEQ ID NO: 13962 - DNA, 21 bp, Homo sapiens
cagcagcttaatggatttcat

SEQ ID NO: 13963 - DNA, 21 bp, Homo sapiens
cagcttgttaaagacctacaa

SEQ ID NO: 13964 - DNA, 21 bp, Homo sapiens
cagctgtatcaatgccaacaa

SEQ ID NO: 13965 - DNA, 21 bp, Homo sapiens
atggatgtctttggaacttca

SEQ ID NO: 13966 - DNA, 21 bp, Homo sapiens
ctggaccaacttgaccgtcta

SEQ ID NO: 13967 - DNA, 21 bp, Homo sapiens
ctgccatttcacatctaataa

SEQ ID NO: 13968 - DNA, 21 bp, Homo sapiens
ctccgtgtacaggaccagtaa

SEQ ID NO: 13969 - DNA, 21 bp, Homo sapiens
ccggaaatgcattgatcataa

SEQ ID NO: 13970 - DNA, 21 bp, Homo sapiens
cacaatgtaattgattatatt

SEQ ID NO: 13971 - DNA, 21 bp, Homo sapiens
tactgcattaatttaatttaa

SEQ ID NO: 13972 - DNA, 21 bp, Homo sapiens
cacattcaaggtggcattcaa

SEQ ID NO: 13973 - DNA, 21 bp, Homo sapiens
acggcggcttatgaacgccaa

SEQ ID NO: 13974 - DNA, 21 bp, Homo sapiens
ccaggctgcctgcggattaaa

SEQ ID NO: 13975 - DNA, 21 bp, Homo sapiens
atgctggaaccaggactcaaa

SEQ ID NO: 13976 - DNA, 21 bp, Homo sapiens
atcaagatcattcagcaataa

SEQ ID NO: 13977 - DNA, 21 bp, Homo sapiens
aagatggaactggataccacc

SEQ ID NO: 13978 - DNA, 21 bp, Homo sapiens
aacgtctccacgaggatgaga

SEQ ID NO: 13979 - DNA, 21 bp, Homo sapiens
aacagagggtttcaaagcata

SEQ ID NO: 13980 - DNA, 21 bp, Homo sapiens
aggctatacataagtattgta

SEQ ID NO: 13981 - DNA, 21 bp, Homo sapiens
tacgtagataccagaggccaa

SEQ ID NO: 13982 - DNA, 21 bp, Homo sapiens
cggaatgttgagtgccttcaa

SEQ ID NO: 13983 - DNA, 21 bp, Homo sapiens
caggagaaccctcaaactcta

SEQ ID NO: 13984 - DNA, 21 bp, Homo sapiens
cagaagctacatggaaggata

SEQ ID NO: 13985 - DNA, 21 bp, Homo sapiens
ccgctgtagattcacaggaaa

SEQ ID NO: 13986 - DNA, 21 bp, Homo sapiens
tcagtggaaggtcgaagtaaa

SEQ ID NO: 13987 - DNA, 21 bp, Homo sapiens
tacctgagaataaaccatcta

SEQ ID NO: 13988 - DNA, 21 bp, Homo sapiens
ttgggagagcatatcccgaaa

SEQ ID NO: 13989 - DNA, 21 bp, Homo sapiens
caggagtattgtttcctctta

SEQ ID NO: 13990 - DNA, 21 bp, Homo sapiens
ctgcgttgtttgtgtgttcta

SEQ ID NO: 13991 - DNA, 21 bp, Homo sapiens
cagcgaattatccaactttaa

SEQ ID NO: 13992 - DNA, 21 bp, Homo sapiens
aaggtagagaaagaaattcaa

SEQ ID NO: 13993 - DNA, 21 bp, Homo sapiens
atgtttgtaattgtttgttaa

SEQ ID NO: 13994 - DNA, 21 bp, Homo sapiens
cagcctgtttcttggaagtta

SEQ ID NO: 13995 - DNA, 21 bp, Homo sapiens
caggtggaatatattgagtat

SEQ ID NO: 13996 - DNA, 21 bp, Homo sapiens
ttggttattaatagagctcta

SEQ ID NO: 13997 - DNA, 21 bp, Homo sapiens
tccgtggagtttggagtgata

SEQ ID NO: 13998 - DNA, 21 bp, Homo sapiens
cccgtgtggttgaccaaatta

SEQ ID NO: 13999 - DNA, 21 bp, Homo sapiens
aaggatttcacaagaactaaa

SEQ ID NO: 14000 - DNA, 21 bp, Homo sapiens
tcccggtttgagagctattta

SEQ ID NO: 14001 - DNA, 21 bp, Homo sapiens
caagacgacagtagcattgaa

SEQ ID NO: 14002 - DNA, 21 bp, Homo sapiens
tgcgtataacttcaccacaaa

SEQ ID NO: 14003 - DNA, 21 bp, Homo sapiens
tgggatcatgatgaaggacaa

SEQ ID NO: 14004 - DNA, 21 bp, Homo sapiens
accctttgacactgaaataaa

SEQ ID NO: 14005 - DNA, 21 bp, Homo sapiens
cagtctctgcttcaccttgaa

SEQ ID NO: 14006 - DNA, 21 bp, Homo sapiens
cgggctgtggttagtgtctta

SEQ ID NO: 14007 - DNA, 21 bp, Homo sapiens
caggagtgtcacctctaccta

SEQ ID NO: 14008 - DNA, 21 bp, Homo sapiens
ctccctcatcattgctactaa

SEQ ID NO: 14009 - DNA, 21 bp, Homo sapiens
atcccatgcctgagtatgtaa

SEQ ID NO: 14010 - DNA, 21 bp, Homo sapiens
cactgcagtattatttgcaaa

SEQ ID NO: 14011 - DNA, 21 bp, Homo sapiens
aacgggaaggaaatcctctta

SEQ ID NO: 14012 - DNA, 21 bp, Homo sapiens
aaggatcacatgctacaacta

SEQ ID NO: 14013 - DNA, 21 bp, Homo sapiens
atggccgtacacagacttcaa

SEQ ID NO: 14014 - DNA, 21 bp, Homo sapiens
cacccatttattaaaggagta

SEQ ID NO: 14015 - DNA, 21 bp, Homo sapiens
accctggttgataaatttgaa

SEQ ID NO: 14016 - DNA, 21 bp, Homo sapiens
aaccagttaaatggaactcta

SEQ ID NO: 14017 - DNA, 21 bp, Homo sapiens
cagtatcaaacccgagtgata

SEQ ID NO: 14018 - DNA, 21 bp, Homo sapiens
tgggttaagtactacaatgta

SEQ ID NO: 14019 - DNA, 21 bp, Homo sapiens
ccgctaatagtctgtcctaaa

SEQ ID NO: 14020 - DNA, 21 bp, Homo sapiens
ttcagtggtattcaacatcaa

SEQ ID NO: 14021 - DNA, 21 bp, Homo sapiens
cagggagatgtcagactgcta

SEQ ID NO: 14022 - DNA, 21 bp, Homo sapiens
cacctgttcagtctcatctaa

SEQ ID NO: 14023 - DNA, 21 bp, Homo sapiens
cggacaatttagtgaagttta

SEQ ID NO: 14024 - DNA, 21 bp, Homo sapiens
cccatttatgtctggtgttaa

SEQ ID NO: 14025 - DNA, 21 bp, Homo sapiens
ccggatatgggctataataca

SEQ ID NO: 14026 - DNA, 21 bp, Homo sapiens
acgaccggatatgggctataa

SEQ ID NO: 14027 - DNA, 21 bp, Homo sapiens
aaggaaattattaaactatat

SEQ ID NO: 14028 - DNA, 21 bp, Homo sapiens
ccgggcttggtgactatcaaa

SEQ ID NO: 14029 - DNA, 21 bp, Homo sapiens
ctgggttggatgataccttaa

SEQ ID NO: 14030 - DNA, 21 bp, Homo sapiens
aagggccttgttctagctgaa

SEQ ID NO: 14031 - DNA, 21 bp, Homo sapiens
caccatggaatatgaagtcaa

SEQ ID NO: 14032 - DNA, 21 bp, Homo sapiens
accatactaaacagtgtagaa

SEQ ID NO: 14033 - DNA, 21 bp, Homo sapiens
ctgagggttaagaccttagaa

SEQ ID NO: 14034 - DNA, 21 bp, Homo sapiens
cacccgataagagctcaataa

SEQ ID NO: 14035 - DNA, 21 bp, Homo sapiens
gtagctcatgttgaaattaaa

SEQ ID NO: 14036 - DNA, 21 bp, Homo sapiens
cagagtggacagaaagcatta

SEQ ID NO: 14037 - DNA, 21 bp, Homo sapiens
cagcaccgacttcttcattga

SEQ ID NO: 14038 - DNA, 21 bp, Homo sapiens
caccggcagcttcatcctcaa

SEQ ID NO: 14039 - DNA, 21 bp, Homo sapiens
caggagtgtgtgtacactgga

SEQ ID NO: 14040 - DNA, 21 bp, Homo sapiens
ccgcttgatcatggttggcta

SEQ ID NO: 14041 - DNA, 21 bp, Homo sapiens
cacgagcctattgctcactta

SEQ ID NO: 14042 - DNA, 21 bp, Homo sapiens
aacctgaagtcaaacaatcaa

SEQ ID NO: 14043 - DNA, 21 bp, Homo sapiens
gagcagaatcctgcacattaa

SEQ ID NO: 14044 - DNA, 21 bp, Homo sapiens
ttgcccaattgccaaactaaa

SEQ ID NO: 14045 - DNA, 21 bp, Homo sapiens
caccttctatcagaaagtaaa

SEQ ID NO: 14046 - DNA, 21 bp, Homo sapiens
atgggtatttatttggataaa

SEQ ID NO: 14047 - DNA, 21 bp, Homo sapiens
aaccatggttgccaactacat

SEQ ID NO: 14048 - DNA, 21 bp, Homo sapiens
ctgatgggcggcattgggaaa

SEQ ID NO: 14049 - DNA, 21 bp, Homo sapiens
ccgagtcacttcggtttctaa

SEQ ID NO: 14050 - DNA, 21 bp, Homo sapiens
aagcgagttcttaaagaagta

SEQ ID NO: 14051 - DNA, 21 bp, Homo sapiens
cagccttactttataccataa

SEQ ID NO: 14052 - DNA, 21 bp, Homo sapiens
caggatttggctcataatcca

SEQ ID NO: 14053 - DNA, 21 bp, Homo sapiens
caggaggaaattgtaagatca

SEQ ID NO: 14054 - DNA, 21 bp, Homo sapiens
ttggatcagaatagcaaggaa

SEQ ID NO: 14055 - DNA, 21 bp, Homo sapiens
cacggagttgggtaccatcaa

SEQ ID NO: 14056 - DNA, 21 bp, Homo sapiens
caggaagggctccttgtacaa

SEQ ID NO: 14057 - DNA, 21 bp, Homo sapiens
taggcaataaatgtttgtcaa

SEQ ID NO: 14058 - DNA, 21 bp, Homo sapiens
caggatcttccgagtccttaa

SEQ ID NO: 14059 - DNA, 21 bp, Homo sapiens
tcaaatgtttaagaagcctaa

SEQ ID NO: 14060 - DNA, 21 bp, Homo sapiens
cagtggatgtagcatccataa

SEQ ID NO: 14061 - DNA, 21 bp, Homo sapiens
tagccgttagtggagaatgaa

SEQ ID NO: 14062 - DNA, 21 bp, Homo sapiens
cccaacttgaatcgagatcaa

SEQ ID NO: 14063 - DNA, 21 bp, Homo sapiens
cccgagaagaatgccagagaa

SEQ ID NO: 14064 - DNA, 21 bp, Homo sapiens
acgcctgtaaattactgagaa

SEQ ID NO: 14065 - DNA, 21 bp, Homo sapiens
ctcgctgtggacgcctgtaaa

SEQ ID NO: 14066 - DNA, 21 bp, Homo sapiens
cgcctgtaaattactgagaaa

SEQ ID NO: 14067 - DNA, 21 bp, Homo sapiens
ctacgtgtgaacaactttata

SEQ ID NO: 14068 - DNA, 21 bp, Homo sapiens
gactgaggctttgtaaattaa

SEQ ID NO: 14069 - DNA, 21 bp, Homo sapiens
ttgggttggtatgatacatta

SEQ ID NO: 14070 - DNA, 21 bp, Homo sapiens
ctcggctgttagggatctgaa

SEQ ID NO: 14071 - DNA, 21 bp, Homo sapiens
aaggtcatatatactatacaa

SEQ ID NO: 14072 - DNA, 21 bp, Homo sapiens
tacggtcctctttctcacata

SEQ ID NO: 14073 - DNA, 21 bp, Homo sapiens
cagagttaacctaatgagtca

SEQ ID NO: 14074 - DNA, 21 bp, Homo sapiens
atggtcagtatcactggataa

SEQ ID NO: 14075 - DNA, 21 bp, Homo sapiens
ccggttaactgcctccagata

SEQ ID NO: 14076 - DNA, 21 bp, Homo sapiens
aaggctggacatctacagtta

SEQ ID NO: 14077 - DNA, 21 bp, Homo sapiens
acgacctttatggacaaggaa

SEQ ID NO: 14078 - DNA, 21 bp, Homo sapiens
ctcactatatattatagtaaa

SEQ ID NO: 14079 - DNA, 21 bp, Homo sapiens
tcccataagaagataattaaa

SEQ ID NO: 14080 - DNA, 21 bp, Homo sapiens
cagagctttatgattctgtaa

SEQ ID NO: 14081 - DNA, 21 bp, Homo sapiens
ttgcatgtcattaatgataaa

SEQ ID NO: 14082 - DNA, 21 bp, Homo sapiens
tcccaaggaggtgaactttaa

SEQ ID NO: 14083 - DNA, 21 bp, Homo sapiens
cagcacctctagttagagtta

SEQ ID NO: 14084 - DNA, 21 bp, Homo sapiens
ctgctgggtagttaccttata

SEQ ID NO: 14085 - DNA, 21 bp, Homo sapiens
aagggactatttatatgtgta

SEQ ID NO: 14086 - DNA, 21 bp, Homo sapiens
aacctgtttgacgctaattaa

SEQ ID NO: 14087 - DNA, 21 bp, Homo sapiens
ctggttcaattccactaccat

SEQ ID NO: 14088 - DNA, 21 bp, Homo sapiens
gccctaggtgtcagtgatcaa

SEQ ID NO: 14089 - DNA, 21 bp, Homo sapiens
ctcatatctgcttattcttaa

SEQ ID NO: 14090 - DNA, 21 bp, Homo sapiens
cagtttgatgcttgtctgcta

SEQ ID NO: 14091 - DNA, 21 bp, Homo sapiens
gtggatctattcaaagcttaa

SEQ ID NO: 14092 - DNA, 21 bp, Homo sapiens
accggaaatgtttaaattaaa

SEQ ID NO: 14093 - DNA, 21 bp, Homo sapiens
ctctaatttgagtgaaataaa

SEQ ID NO: 14094 - DNA, 21 bp, Homo sapiens
ataaagccctgctgaaggaaa

SEQ ID NO: 14095 - DNA, 21 bp, Homo sapiens
agggagtcaattcctaggata

SEQ ID NO: 14096 - DNA, 21 bp, Homo sapiens
cagagagatggacaacagaca

SEQ ID NO: 14097 - DNA, 21 bp, Homo sapiens
atccagtgagatccagtttaa

SEQ ID NO: 14098 - DNA, 21 bp, Homo sapiens
taggcctgatattaatagcaa

SEQ ID NO: 14099 - DNA, 21 bp, Homo sapiens
aaggaatgtttagaagaccaa

SEQ ID NO: 14100 - DNA, 21 bp, Homo sapiens
cagcgcataaaggagatttaa

SEQ ID NO: 14101 - DNA, 21 bp, Homo sapiens
acaggatttcatacttattaa

SEQ ID NO: 14102 - DNA, 21 bp, Homo sapiens
ctgcagtagctaagactataa

SEQ ID NO: 14103 - DNA, 21 bp, Homo sapiens
ttggaggctaaaggaagtaaa

SEQ ID NO: 14104 - DNA, 21 bp, Homo sapiens
cagcagttatttgggtgtgaa

SEQ ID NO: 14105 - DNA, 21 bp, Homo sapiens
tacgttgttgtgggagattta

SEQ ID NO: 14106 - DNA, 21 bp, Homo sapiens
cagggaattcacagcaaacta

SEQ ID NO: 14107 - DNA, 21 bp, Homo sapiens
cagcattatgaggatttacaa

SEQ ID NO: 14108 - DNA, 21 bp, Homo sapiens
cacaatgtcaatatacattat

SEQ ID NO: 14109 - DNA, 21 bp, Homo sapiens
ttgcaatattattagattaaa

SEQ ID NO: 14110 - DNA, 21 bp, Homo sapiens
cagcaagggtatatttataaa

SEQ ID NO: 14111 - DNA, 21 bp, Homo sapiens
aaccatattattgatgatgaa

SEQ ID NO: 14112 - DNA, 21 bp, Homo sapiens
aaggaataatactgtacataa

SEQ ID NO: 14113 - DNA, 21 bp, Homo sapiens
cccatatactgtgaacttcaa

SEQ ID NO: 14114 - DNA, 21 bp, Homo sapiens
aaggttatagtaaatacttat

SEQ ID NO: 14115 - DNA, 21 bp, Homo sapiens
cttgggatttacagcaattaa

SEQ ID NO: 14116 - DNA, 21 bp, Homo sapiens
ctgcatgatgtctcacagaaa

SEQ ID NO: 14117 - DNA, 21 bp, Homo sapiens
cagcaccgacttctcacctaa

SEQ ID NO: 14118 - DNA, 21 bp, Homo sapiens
caagagcgacttcctaatcaa

SEQ ID NO: 14119 - DNA, 21 bp, Homo sapiens
tggatggtttctaataataaa

SEQ ID NO: 14120 - DNA, 21 bp, Homo sapiens
cagagccttgattacatagaa

SEQ ID NO: 14121 - DNA, 21 bp, Homo sapiens
ccagctcatttggtcacataa

SEQ ID NO: 14122 - DNA, 21 bp, Homo sapiens
ccggctgaggtgttcaataaa

SEQ ID NO: 14123 - DNA, 21 bp, Homo sapiens
caggaatactttaacaattaa

SEQ ID NO: 14124 - DNA, 21 bp, Homo sapiens
tcccagtagattagacttcaa

SEQ ID NO: 14125 - DNA, 21 bp, Homo sapiens
atgcagtaggagaacaatgta

SEQ ID NO: 14126 - DNA, 21 bp, Homo sapiens
cactgcaagctaaatacataa

SEQ ID NO: 14127 - DNA, 21 bp, Homo sapiens
atgggaatgtttagttcacta

SEQ ID NO: 14128 - DNA, 21 bp, Homo sapiens
caagctgatctaatacgttaa

SEQ ID NO: 14129 - DNA, 21 bp, Homo sapiens
aagaaattcatcagccttcta

SEQ ID NO: 14130 - DNA, 21 bp, Homo sapiens
cagatcagtggcaatcattta

SEQ ID NO: 14131 - DNA, 21 bp, Homo sapiens
ccgcttcttcacggcgctcaa

SEQ ID NO: 14132 - DNA, 21 bp, Homo sapiens
aacctcggtattccaacttta

SEQ ID NO: 14133 - DNA, 21 bp, Homo sapiens
cccactgattcagaagataaa

SEQ ID NO: 14134 - DNA, 21 bp, Homo sapiens
atggtgtattctggatgtcta

SEQ ID NO: 14135 - DNA, 21 bp, Homo sapiens
ccagtaatgaataatcattaa

SEQ ID NO: 14136 - DNA, 21 bp, Homo sapiens
cacatgtgtcttcacattcaa

SEQ ID NO: 14137 - DNA, 21 bp, Homo sapiens
aggcatcacctcaagatgaaa

SEQ ID NO: 14138 - DNA, 21 bp, Homo sapiens
aagagtaagccagccagtaaa

SEQ ID NO: 14139 - DNA, 21 bp, Homo sapiens
cacattggtcatgacatgtta

SEQ ID NO: 14140 - DNA, 21 bp, Homo sapiens
acggcccaggttaaatggaaa

SEQ ID NO: 14141 - DNA, 21 bp, Homo sapiens
cagcatgagcccaatgatgaa

SEQ ID NO: 14142 - DNA, 21 bp, Homo sapiens
ccggaggatggtgactgccaa

SEQ ID NO: 14143 - DNA, 21 bp, Homo sapiens
cagggactcagtatgaaccta

SEQ ID NO: 14144 - DNA, 21 bp, Homo sapiens
cagcattctatgtgcaagata

SEQ ID NO: 14145 - DNA, 21 bp, Homo sapiens
cagtatgaacctactgtcaaa

SEQ ID NO: 14146 - DNA, 21 bp, Homo sapiens
ctgcagtcgttccgacacaaa

SEQ ID NO: 14147 - DNA, 21 bp, Homo sapiens
cgggctggtcatcctgggcta

SEQ ID NO: 14148 - DNA, 21 bp, Homo sapiens
cgctgtcttcatcctcatgaa

SEQ ID NO: 14149 - DNA, 21 bp, Homo sapiens
ccgcctggaagtcaagtgcaa

SEQ ID NO: 14150 - DNA, 21 bp, Homo sapiens
cagggccaacataccttgtaa

SEQ ID NO: 14151 - DNA, 21 bp, Homo sapiens
aaggttgtccacatgaataaa

SEQ ID NO: 14152 - DNA, 21 bp, Homo sapiens
tccggtggctagccagacaaa

SEQ ID NO: 14153 - DNA, 21 bp, Homo sapiens
ccagttctgcacccacataaa

SEQ ID NO: 14154 - DNA, 21 bp, Homo sapiens
gcccagtttattggagagaaa

SEQ ID NO: 14155 - DNA, 21 bp, Homo sapiens
cagcacaatttgcgattgaaa

SEQ ID NO: 14156 - DNA, 21 bp, Homo sapiens
tccaatcatagttgagaacaa

SEQ ID NO: 14157 - DNA, 21 bp, Homo sapiens
ccgcgccatgaagaaagccaa

SEQ ID NO: 14158 - DNA, 21 bp, Homo sapiens
ctgggcgttaaggaagcccaa

SEQ ID NO: 14159 - DNA, 21 bp, Homo sapiens
ccggagctggcaggtctacaa

SEQ ID NO: 14160 - DNA, 21 bp, Homo sapiens
ctcactggttatagtgctata

SEQ ID NO: 14161 - DNA, 21 bp, Homo sapiens
caggacgacgctcacaattga

SEQ ID NO: 14162 - DNA, 21 bp, Homo sapiens
cacaattgaaagatggactaa

SEQ ID NO: 14163 - DNA, 21 bp, Homo sapiens
cagacgtgagccgatcattaa

SEQ ID NO: 14164 - DNA, 21 bp, Homo sapiens
cagggtggtcagggtgcagaa

SEQ ID NO: 14165 - DNA, 21 bp, Homo sapiens
aagcttggcaggtatattata

SEQ ID NO: 14166 - DNA, 21 bp, Homo sapiens
cagaggatatatcccagcaaa

SEQ ID NO: 14167 - DNA, 21 bp, Homo sapiens
caggtatattatatttcatca

SEQ ID NO: 14168 - DNA, 21 bp, Homo sapiens
cccgcctacaacagagagaaa

SEQ ID NO: 14169 - DNA, 21 bp, Homo sapiens
cacatggaaatgtatcctcaa

SEQ ID NO: 14170 - DNA, 21 bp, Homo sapiens
atggacttcctgcaaacacta

SEQ ID NO: 14171 - DNA, 21 bp, Homo sapiens
aagaatcagaatgtaccataa

SEQ ID NO: 14172 - DNA, 21 bp, Homo sapiens
cagtttattcttggcaatcaa

SEQ ID NO: 14173 - DNA, 21 bp, Homo sapiens
aaggtcttaaggagaaatgaa

SEQ ID NO: 14174 - DNA, 21 bp, Homo sapiens
ctgaatcatataagttggtaa

SEQ ID NO: 14175 - DNA, 21 bp, Homo sapiens
aacgtcattcatccacattaa

SEQ ID NO: 14176 - DNA, 21 bp, Homo sapiens
caagaactttatgttatccaa

SEQ ID NO: 14177 - DNA, 21 bp, Homo sapiens
cccattgtggtccgtccttaa

SEQ ID NO: 14178 - DNA, 21 bp, Homo sapiens
ttcagttctgttcctattaaa

SEQ ID NO: 14179 - DNA, 21 bp, Homo sapiens
aacaacaagcttggaacataa

SEQ ID NO: 14180 - DNA, 21 bp, Homo sapiens
aagaagctaactttcatatta

SEQ ID NO: 14181 - DNA, 21 bp, Homo sapiens
cacgccctgggaagaaagcta

SEQ ID NO: 14182 - DNA, 21 bp, Homo sapiens
gacagacacaggagaaataaa

SEQ ID NO: 14183 - DNA, 21 bp, Homo sapiens
caaaccatcaattaatattaa

SEQ ID NO: 14184 - DNA, 21 bp, Homo sapiens
cagggcagggttgctgagcaa

SEQ ID NO: 14185 - DNA, 21 bp, Homo sapiens
tacgtgtgtctcaatgagtat

SEQ ID NO: 14186 - DNA, 21 bp, Homo sapiens
aaggtaaatggtgaatacatt

SEQ ID NO: 14187 - DNA, 21 bp, Homo sapiens
taccacctctccaaataccaa

SEQ ID NO: 14188 - DNA, 21 bp, Homo sapiens
atcggaacagaaattctataa

SEQ ID NO: 14189 - DNA, 21 bp, Homo sapiens
ctcccagatcttcgccaggaa

SEQ ID NO: 14190 - DNA, 21 bp, Homo sapiens
atcatcggaacagaaattcta

SEQ ID NO: 14191 - DNA, 21 bp, Homo sapiens
cacgcggtcattccaactcaa

SEQ ID NO: 14192 - DNA, 21 bp, Homo sapiens
acgggccgtgctggaagacaa

SEQ ID NO: 14193 - DNA, 21 bp, Homo sapiens
cagctttgactccaccaccta

SEQ ID NO: 14194 - DNA, 21 bp, Homo sapiens
aagaataaagtgggtttgaaa

SEQ ID NO: 14195 - DNA, 21 bp, Homo sapiens
aagattcataccagagtttaa

SEQ ID NO: 14196 - DNA, 21 bp, Homo sapiens
aagaattatattaaagattca

SEQ ID NO: 14197 - DNA, 21 bp, Homo sapiens
cagggtgtcctgagtctcata

SEQ ID NO: 14198 - DNA, 21 bp, Homo sapiens
cagcacatagacagcgatgaa

SEQ ID NO: 14199 - DNA, 21 bp, Homo sapiens
ctcggccaagatgaactacaa

SEQ ID NO: 14200 - DNA, 21 bp, Homo sapiens
cagggttgtgtccaacataca

SEQ ID NO: 14201 - DNA, 21 bp, Homo sapiens
ccctggagatcgcggaggcaa

SEQ ID NO: 14202 - DNA, 21 bp, Homo sapiens
ctccgtgctggtgcaccttat

SEQ ID NO: 14203 - DNA, 21 bp, Homo sapiens
ccctgccatttaggtgcctaa

SEQ ID NO: 14204 - DNA, 21 bp, Homo sapiens
cagcctgttaatgaacagcca

SEQ ID NO: 14205 - DNA, 21 bp, Homo sapiens
cagctggtggttcttaggttt

SEQ ID NO: 14206 - DNA, 21 bp, Homo sapiens
atggcccgtgttcataactca

SEQ ID NO: 14207 - DNA, 21 bp, Homo sapiens
cagctaggacatctagcttta

SEQ ID NO: 14208 - DNA, 21 bp, Homo sapiens
cagaagtgtaaagaactccaa

SEQ ID NO: 14209 - DNA, 21 bp, Homo sapiens
accgctgagagtggacaagca

SEQ ID NO: 14210 - DNA, 21 bp, Homo sapiens
caagtgtgaagagtacaggaa

SEQ ID NO: 14211 - DNA, 21 bp, Homo sapiens
cagaatggaaaccgcaccaaa

SEQ ID NO: 14212 - DNA, 21 bp, Homo sapiens
caggaagacgagtgaacccaa

SEQ ID NO: 14213 - DNA, 21 bp, Homo sapiens
ccctccttgtatatccttaaa

SEQ ID NO: 14214 - DNA, 21 bp, Homo sapiens
accctccttgtatatccttaa

SEQ ID NO: 14215 - DNA, 21 bp, Homo sapiens
cagcaccttatcagcagggta

SEQ ID NO: 14216 - DNA, 21 bp, Homo sapiens
ctccatattcacctcatcaaa

SEQ ID NO: 14217 - DNA, 21 bp, Homo sapiens
ctgcaagcaattcagattaaa

SEQ ID NO: 14218 - DNA, 21 bp, Homo sapiens
cagcaaacttgaaccgactaa

SEQ ID NO: 14219 - DNA, 21 bp, Homo sapiens
aacagactcatggacattaaa

SEQ ID NO: 14220 - DNA, 21 bp, Homo sapiens
caccgtggagctgcagatcaa

SEQ ID NO: 14221 - DNA, 21 bp, Homo sapiens
cagagacagtgatggaatcaa

SEQ ID NO: 14222 - DNA, 21 bp, Homo sapiens
tacaatgacctattgaagaaa

SEQ ID NO: 14223 - DNA, 21 bp, Homo sapiens
cccggccagcttcttaatgaa

SEQ ID NO: 14224 - DNA, 21 bp, Homo sapiens
caggctctgcacagtacccaa

SEQ ID NO: 14225 - DNA, 21 bp, Homo sapiens
caccacaggctcggcgagaaa

SEQ ID NO: 14226 - DNA, 21 bp, Homo sapiens
cccattgacctccaggacaaa

SEQ ID NO: 14227 - DNA, 21 bp, Homo sapiens
caggagattcgagaactacaa

SEQ ID NO: 14228 - DNA, 21 bp, Homo sapiens
ccggcgagaggcagaacttta

SEQ ID NO: 14229 - DNA, 21 bp, Homo sapiens
aacattcataagtaggaaata

SEQ ID NO: 14230 - DNA, 21 bp, Homo sapiens
ctgcagagtacaagttgcaaa

SEQ ID NO: 14231 - DNA, 21 bp, Homo sapiens
tagccacacatgcgccatgaa

SEQ ID NO: 14232 - DNA, 21 bp, Homo sapiens
agggtgtgggtccatattaaa

SEQ ID NO: 14233 - DNA, 21 bp, Homo sapiens
ccagaggctaattctgattta

SEQ ID NO: 14234 - DNA, 21 bp, Homo sapiens
cagaatgaatattcttgcaga

SEQ ID NO: 14235 - DNA, 21 bp, Homo sapiens
caagaagtgttgctactacaa

SEQ ID NO: 14236 - DNA, 21 bp, Homo sapiens
ctgagctcttctaacactaaa

SEQ ID NO: 14237 - DNA, 21 bp, Homo sapiens
ctgggatgtatgttccttaca

SEQ ID NO: 14238 - DNA, 21 bp, Homo sapiens
acgctgtggaagataaaccta

SEQ ID NO: 14239 - DNA, 21 bp, Homo sapiens
ccagatctccgtgaaattaaa

SEQ ID NO: 14240 - DNA, 21 bp, Homo sapiens
cccactgatggtggttcacaa

SEQ ID NO: 14241 - DNA, 21 bp, Homo sapiens
caggcaaatgttgggaagcaa

SEQ ID NO: 14242 - DNA, 21 bp, Homo sapiens
cacaagtgagttaacatttca

SEQ ID NO: 14243 - DNA, 21 bp, Homo sapiens
cctaataatactgcacatgaa

SEQ ID NO: 14244 - DNA, 21 bp, Homo sapiens
catgcataccacagaatcaaa

SEQ ID NO: 14245 - DNA, 21 bp, Homo sapiens
taagaggagtattgaatgtaa

SEQ ID NO: 14246 - DNA, 21 bp, Homo sapiens
ctcattgatcctaataatact

SEQ ID NO: 14247 - DNA, 21 bp, Homo sapiens
aactaagaaggtcgtgttcaa

SEQ ID NO: 14248 - DNA, 21 bp, Homo sapiens
ccgggtgaagttctacatgca

SEQ ID NO: 14249 - DNA, 21 bp, Homo sapiens
cagaagatgctcaaccctcaa

SEQ ID NO: 14250 - DNA, 21 bp, Homo sapiens
aacatgttagacattaccgta

SEQ ID NO: 14251 - DNA, 21 bp, Homo sapiens
tcgcagcctgtcctacaataa

SEQ ID NO: 14252 - DNA, 21 bp, Homo sapiens
ctggcatttctttgataacat

SEQ ID NO: 14253 - DNA, 21 bp, Homo sapiens
ctggctgaggatggcaaccta

SEQ ID NO: 14254 - DNA, 21 bp, Homo sapiens
caccaactccacgcacatata

SEQ ID NO: 14255 - DNA, 21 bp, Homo sapiens
cacagtgatacaaagaatgaa

SEQ ID NO: 14256 - DNA, 21 bp, Homo sapiens
caggttagtggtacaaagtca

SEQ ID NO: 14257 - DNA, 21 bp, Homo sapiens
ccaaacatgtatctcaatata

SEQ ID NO: 14258 - DNA, 21 bp, Homo sapiens
ctgcggacaattagtattcaa

SEQ ID NO: 14259 - DNA, 21 bp, Homo sapiens
caggttcagactacacaatta

SEQ ID NO: 14260 - DNA, 21 bp, Homo sapiens
acgacagtccgggtaacataa

SEQ ID NO: 14261 - DNA, 21 bp, Homo sapiens
ccgggagaacatcaatgcttt

SEQ ID NO: 14262 - DNA, 21 bp, Homo sapiens
atgcagtttattctactccaa

SEQ ID NO: 14263 - DNA, 21 bp, Homo sapiens
cagcatcatctttgccgtcaa

SEQ ID NO: 14264 - DNA, 21 bp, Homo sapiens
ctgcatcttataaaccagcaa

SEQ ID NO: 14265 - DNA, 21 bp, Homo sapiens
acgggtattgtgtataggaaa

SEQ ID NO: 14266 - DNA, 21 bp, Homo sapiens
ctcaattacatgaacaattta

SEQ ID NO: 14267 - DNA, 21 bp, Homo sapiens
ctccaggaaagtaatgttcaa

SEQ ID NO: 14268 - DNA, 21 bp, Homo sapiens
aaggtggatgtgaaacatgaa

SEQ ID NO: 14269 - DNA, 21 bp, Homo sapiens
ttgaatgagtacagtaatgaa

SEQ ID NO: 14270 - DNA, 21 bp, Homo sapiens
aagcaacacatctaacttata

SEQ ID NO: 14271 - DNA, 21 bp, Homo sapiens
aatgagtttaattgacttcaa

SEQ ID NO: 14272 - DNA, 21 bp, Homo sapiens
taggatttatgttatagataa

SEQ ID NO: 14273 - DNA, 21 bp, Homo sapiens
ttggaactggttagtacctaa

SEQ ID NO: 14274 - DNA, 21 bp, Homo sapiens
ctcgatctggaattacagcta

SEQ ID NO: 14275 - DNA, 21 bp, Homo sapiens
ctacctgtacctcgaagtcta

SEQ ID NO: 14276 - DNA, 21 bp, Homo sapiens
tcgacctggacttgaactaaa

SEQ ID NO: 14277 - DNA, 21 bp, Homo sapiens
caggaccaagatgacgcccaa

SEQ ID NO: 14278 - DNA, 21 bp, Homo sapiens
aagcctcatcatcaccgcgaa

SEQ ID NO: 14279 - DNA, 21 bp, Homo sapiens
cccgacataggatgagggcat

SEQ ID NO: 14280 - DNA, 21 bp, Homo sapiens
ctaacaagacgcaatgggaaa

SEQ ID NO: 14281 - DNA, 21 bp, Homo sapiens
aagcaaggattctacatcaaa

SEQ ID NO: 14282 - DNA, 21 bp, Homo sapiens
acggcttctaatagagctata

SEQ ID NO: 14283 - DNA, 21 bp, Homo sapiens
ccggccctggtctccactcta

SEQ ID NO: 14284 - DNA, 21 bp, Homo sapiens
ccacttcatgatgtcgcttta

SEQ ID NO: 14285 - DNA, 21 bp, Homo sapiens
gccgttgcacgtggacttcaa

SEQ ID NO: 14286 - DNA, 21 bp, Homo sapiens
aacaacgttgtctacaagcaa

SEQ ID NO: 14287 - DNA, 21 bp, Homo sapiens
taggagctcagtacatgtaaa

SEQ ID NO: 14288 - DNA, 21 bp, Homo sapiens
aaggtggccaatggtgctgaa

SEQ ID NO: 14289 - DNA, 21 bp, Homo sapiens
caggagctatcccactgagaa

SEQ ID NO: 14290 - DNA, 21 bp, Homo sapiens
caagctgctgttgatgacaaa

SEQ ID NO: 14291 - DNA, 21 bp, Homo sapiens
cagaataggattcgagattta

SEQ ID NO: 14292 - DNA, 21 bp, Homo sapiens
ctcacactaaattaaattcaa

SEQ ID NO: 14293 - DNA, 21 bp, Homo sapiens
cagagggatatttgcctccta

SEQ ID NO: 14294 - DNA, 21 bp, Homo sapiens
aagagacaagtccttactata

SEQ ID NO: 14295 - DNA, 21 bp, Homo sapiens
tggaatgatattcaccacaaa

SEQ ID NO: 14296 - DNA, 21 bp, Homo sapiens
tgggcaagcattggtaataaa

SEQ ID NO: 14297 - DNA, 21 bp, Homo sapiens
ctgtagagtcacatatatgaa

SEQ ID NO: 14298 - DNA, 21 bp, Homo sapiens
aagcgtgaacccatattgata

SEQ ID NO: 14299 - DNA, 21 bp, Homo sapiens
ctggtggtcttaggtctataa

SEQ ID NO: 14300 - DNA, 21 bp, Homo sapiens
caggactacgagaaagacaaa

SEQ ID NO: 14301 - DNA, 21 bp, Homo sapiens
caccttcaacaccaccacaaa

SEQ ID NO: 14302 - DNA, 21 bp, Homo sapiens
cccacagtaaacgcaaagtaa

SEQ ID NO: 14303 - DNA, 21 bp, Homo sapiens
tccagtaatattggccacaaa

SEQ ID NO: 14304 - DNA, 21 bp, Homo sapiens
aaggaccttatttggcatata

SEQ ID NO: 14305 - DNA, 21 bp, Homo sapiens
ctgcaaagccatcatcattaa

SEQ ID NO: 14306 - DNA, 21 bp, Homo sapiens
aagggtaagaaggacaatgaa

SEQ ID NO: 14307 - DNA, 21 bp, Homo sapiens
cagaataatccttgagagaaa

SEQ ID NO: 14308 - DNA, 21 bp, Homo sapiens
cacccagcacttgcaaggcta

SEQ ID NO: 14309 - DNA, 21 bp, Homo sapiens
cacggacaagggatgagagaa

SEQ ID NO: 14310 - DNA, 21 bp, Homo sapiens
ctggagaaacagtgtactatt

SEQ ID NO: 14311 - DNA, 21 bp, Homo sapiens
cagagagaagtgtaaatgaca

SEQ ID NO: 14312 - DNA, 21 bp, Homo sapiens
tagttgtttggtcacaaataa

SEQ ID NO: 14313 - DNA, 21 bp, Homo sapiens
ttctgcagagctggacttcaa

SEQ ID NO: 14314 - DNA, 21 bp, Homo sapiens
cagaacaatctccctgggaaa

SEQ ID NO: 14315 - DNA, 21 bp, Homo sapiens
caagagcagaatagtacttaa

SEQ ID NO: 14316 - DNA, 21 bp, Homo sapiens
aaccatttcagtattgataaa

SEQ ID NO: 14317 - DNA, 21 bp, Homo sapiens
aaggagaacactggtatggaa

SEQ ID NO: 14318 - DNA, 21 bp, Homo sapiens
aacacagatggtgaagattaa

SEQ ID NO: 14319 - DNA, 21 bp, Homo sapiens
cagaatttctacaaactttga

SEQ ID NO: 14320 - DNA, 21 bp, Homo sapiens
cagaaaggtataatcatgtaa

SEQ ID NO: 14321 - DNA, 21 bp, Homo sapiens
tacaagttcattagttctaaa

SEQ ID NO: 14322 - DNA, 21 bp, Homo sapiens
caggctgtctttcacaatcca

SEQ ID NO: 14323 - DNA, 21 bp, Homo sapiens
tcggtcctattaaataacata

SEQ ID NO: 14324 - DNA, 21 bp, Homo sapiens
ctcatttataatagtgccaaa

SEQ ID NO: 14325 - DNA, 21 bp, Homo sapiens
ccctgagatttgtgttgtcaa

SEQ ID NO: 14326 - DNA, 21 bp, Homo sapiens
aacggcatcgaggcatttcaa

SEQ ID NO: 14327 - DNA, 21 bp, Homo sapiens
acggagatgatcgtctttgaa

SEQ ID NO: 14328 - DNA, 21 bp, Homo sapiens
aacgaagagaaccatgagcaa

SEQ ID NO: 14329 - DNA, 21 bp, Homo sapiens
ccgggtgtgcccagaagtcaa

SEQ ID NO: 14330 - DNA, 21 bp, Homo sapiens
aagcacttaatcatacttaaa

SEQ ID NO: 14331 - DNA, 21 bp, Homo sapiens
tcgacttgctatcaaagtgaa

SEQ ID NO: 14332 - DNA, 21 bp, Homo sapiens
ccgaatatacatcttccacta

SEQ ID NO: 14333 - DNA, 21 bp, Homo sapiens
aagcagaatatccacagccta

SEQ ID NO: 14334 - DNA, 21 bp, Homo sapiens
aaggagaggcaaacaagtata

SEQ ID NO: 14335 - DNA, 21 bp, Homo sapiens
cacggccgacttagtaattca

SEQ ID NO: 14336 - DNA, 21 bp, Homo sapiens
cagagggagattagcaatgaa

SEQ ID NO: 14337 - DNA, 21 bp, Homo sapiens
taggtttgcaaacaaagttaa

SEQ ID NO: 14338 - DNA, 21 bp, Homo sapiens
caggaatgatttgaactgata

SEQ ID NO: 14339 - DNA, 21 bp, Homo sapiens
taccattggtaaagtctccaa

SEQ ID NO: 14340 - DNA, 21 bp, Homo sapiens
cccaatctatctataccttat

SEQ ID NO: 14341 - DNA, 21 bp, Homo sapiens
cgggttcattatggtctatat

SEQ ID NO: 14342 - DNA, 21 bp, Homo sapiens
aaggttaaacatatgatagaa

SEQ ID NO: 14343 - DNA, 21 bp, Homo sapiens
acccgccatagcagtgaccaa

SEQ ID NO: 14344 - DNA, 21 bp, Homo sapiens
ccgagaagccctggagataaa

SEQ ID NO: 14345 - DNA, 21 bp, Homo sapiens
cacggtgtgtgtggattgtca

SEQ ID NO: 14346 - DNA, 21 bp, Homo sapiens
cagaggatgctggatactgta

SEQ ID NO: 14347 - DNA, 21 bp, Homo sapiens
ctgagacactaaataaatata

SEQ ID NO: 14348 - DNA, 21 bp, Homo sapiens
cggcctcaaactcaagataaa

SEQ ID NO: 14349 - DNA, 21 bp, Homo sapiens
cagtaggaggataattaacaa

SEQ ID NO: 14350 - DNA, 21 bp, Homo sapiens
tgcgggaattatcatgatcaa

SEQ ID NO: 14351 - DNA, 21 bp, Homo sapiens
aaggcgtttcatcaccaccaa

SEQ ID NO: 14352 - DNA, 21 bp, Homo sapiens
acccaggaggttcaacatgaa

SEQ ID NO: 14353 - DNA, 21 bp, Homo sapiens
acggcgctggctgcagaagaa

SEQ ID NO: 14354 - DNA, 21 bp, Homo sapiens
cacgaccacaccacaggccaa

SEQ ID NO: 14355 - DNA, 21 bp, Homo sapiens
caggctgcaggtctcaggata

SEQ ID NO: 14356 - DNA, 21 bp, Homo sapiens
ctccacctggcttattattta

SEQ ID NO: 14357 - DNA, 21 bp, Homo sapiens
cagaccgagtgagcccagcta

SEQ ID NO: 14358 - DNA, 21 bp, Homo sapiens
cacgctcagccgagctcatca

SEQ ID NO: 14359 - DNA, 21 bp, Homo sapiens
ctggtggacttctatgcctta

SEQ ID NO: 14360 - DNA, 21 bp, Homo sapiens
caggacctcacctactatgaa

SEQ ID NO: 14361 - DNA, 21 bp, Homo sapiens
tagagttgatttcccagctaa

SEQ ID NO: 14362 - DNA, 21 bp, Homo sapiens
caggatttgggtaaagtcaca

SEQ ID NO: 14363 - DNA, 21 bp, Homo sapiens
ccgaaccaggaactcaatcaa

SEQ ID NO: 14364 - DNA, 21 bp, Homo sapiens
cagccagtaattcccaggcaa

SEQ ID NO: 14365 - DNA, 21 bp, Homo sapiens
cagcgattatttccctctcaa

SEQ ID NO: 14366 - DNA, 21 bp, Homo sapiens
ttggatgtgattgaactttat

SEQ ID NO: 14367 - DNA, 21 bp, Homo sapiens
aggcctgagagggctaatcaa

SEQ ID NO: 14368 - DNA, 21 bp, Homo sapiens
ccagagactaggaaacgtaaa

SEQ ID NO: 14369 - DNA, 21 bp, Homo sapiens
gaggacttactctacagtgaa

SEQ ID NO: 14370 - DNA, 21 bp, Homo sapiens
cccagagactaggaaacgtaa

SEQ ID NO: 14371 - DNA, 21 bp, Homo sapiens
tagatgtaatatctaccttaa

SEQ ID NO: 14372 - DNA, 21 bp, Homo sapiens
caggctctttgtcctactaaa

SEQ ID NO: 14373 - DNA, 21 bp, Homo sapiens
ctccattattctctaaatgaa

SEQ ID NO: 14374 - DNA, 21 bp, Homo sapiens
acgctttatgttatacattaa

SEQ ID NO: 14375 - DNA, 21 bp, Homo sapiens
ctgggacatgctggaaaggaa

SEQ ID NO: 14376 - DNA, 21 bp, Homo sapiens
aaggctgaagacagaaatgaa

SEQ ID NO: 14377 - DNA, 21 bp, Homo sapiens
ctggatcactttcaatgagaa

SEQ ID NO: 14378 - DNA, 21 bp, Homo sapiens
ctccatcttctgcacacgaaa

SEQ ID NO: 14379 - DNA, 21 bp, Homo sapiens
aaggaggaaagggtagtttaa

SEQ ID NO: 14380 - DNA, 21 bp, Homo sapiens
aagcctggaaagagtgatgaa

SEQ ID NO: 14381 - DNA, 21 bp, Homo sapiens
aagaatgtgtttactgtgtta

SEQ ID NO: 14382 - DNA, 21 bp, Homo sapiens
cagaaggagctcaagctttaa

SEQ ID NO: 14383 - DNA, 21 bp, Homo sapiens
ctcaattctcagggactttaa

SEQ ID NO: 14384 - DNA, 21 bp, Homo sapiens
ccctcaaagcctagaaattta

SEQ ID NO: 14385 - DNA, 21 bp, Homo sapiens
cacaaattgtacgtaatgata

SEQ ID NO: 14386 - DNA, 21 bp, Homo sapiens
aaagggatggtacaagtctaa

SEQ ID NO: 14387 - DNA, 21 bp, Homo sapiens
tgggagttcgattatcaacaa

SEQ ID NO: 14388 - DNA, 21 bp, Homo sapiens
ctcctagtgcttagtggtcaa

SEQ ID NO: 14389 - DNA, 21 bp, Homo sapiens
ccggatctagattccgtagat

SEQ ID NO: 14390 - DNA, 21 bp, Homo sapiens
caggtggagtataatgacata

SEQ ID NO: 14391 - DNA, 21 bp, Homo sapiens
ctcccatttaactgagtataa

SEQ ID NO: 14392 - DNA, 21 bp, Homo sapiens
tcagttgacaatgaccatgaa

SEQ ID NO: 14393 - DNA, 21 bp, Homo sapiens
cccaatcataattaagccgta

SEQ ID NO: 14394 - DNA, 21 bp, Homo sapiens
atgcctcatcttaatagctaa

SEQ ID NO: 14395 - DNA, 21 bp, Homo sapiens
ctccagataatttataagtaa

SEQ ID NO: 14396 - DNA, 21 bp, Homo sapiens
aaggcatagaatataaatgaa

SEQ ID NO: 14397 - DNA, 21 bp, Homo sapiens
ctggttctggcctatgatcaa

SEQ ID NO: 14398 - DNA, 21 bp, Homo sapiens
caggacgacattgcccaagaa

SEQ ID NO: 14399 - DNA, 21 bp, Homo sapiens
cagcttactagtagccctgaa

SEQ ID NO: 14400 - DNA, 21 bp, Homo sapiens
tcgaagtttctcatcaggaaa

SEQ ID NO: 14401 - DNA, 21 bp, Homo sapiens
taggtatttgatagcagttga

SEQ ID NO: 14402 - DNA, 21 bp, Homo sapiens
taagatagttctgaaaggtaa

SEQ ID NO: 14403 - DNA, 21 bp, Homo sapiens
ttccttgaaggtgaaccgtaa

SEQ ID NO: 14404 - DNA, 21 bp, Homo sapiens
acccaagaattggttcaaata

SEQ ID NO: 14405 - DNA, 21 bp, Homo sapiens
aagagagaggttgtcaagaaa

SEQ ID NO: 14406 - DNA, 21 bp, Homo sapiens
aagcagaagatactactttaa

SEQ ID NO: 14407 - DNA, 21 bp, Homo sapiens
cagagttaattcactattaaa

SEQ ID NO: 14408 - DNA, 21 bp, Homo sapiens
tccatttaatttaataatcaa

SEQ ID NO: 14409 - DNA, 21 bp, Homo sapiens
ccgtccctatctattcagtta

SEQ ID NO: 14410 - DNA, 21 bp, Homo sapiens
tacaactataaaggaggtgaa

SEQ ID NO: 14411 - DNA, 21 bp, Homo sapiens
tcgggtccggacagccagtaa

SEQ ID NO: 14412 - DNA, 21 bp, Homo sapiens
cgccaacatgtgcaagcacaa

SEQ ID NO: 14413 - DNA, 21 bp, Homo sapiens
caagtggtactatgacagcta

SEQ ID NO: 14414 - DNA, 21 bp, Homo sapiens
aggcatgaagtgccagttcaa

SEQ ID NO: 14415 - DNA, 21 bp, Homo sapiens
ctgggaattcatctaaagatt

SEQ ID NO: 14416 - DNA, 21 bp, Homo sapiens
aagacagtggttgaagagcta

SEQ ID NO: 14417 - DNA, 21 bp, Homo sapiens
ctggaacacctcatcatgcct

SEQ ID NO: 14418 - DNA, 21 bp, Homo sapiens
cgcaaggtggttggcgctgta

SEQ ID NO: 14419 - DNA, 21 bp, Homo sapiens
cagcacttgctaaacatctaa

SEQ ID NO: 14420 - DNA, 21 bp, Homo sapiens
caggtattccacataccttaa

SEQ ID NO: 14421 - DNA, 21 bp, Homo sapiens
cccatgcgtatacattgttta

SEQ ID NO: 14422 - DNA, 21 bp, Homo sapiens
aacaattaatctccaagtaat

SEQ ID NO: 14423 - DNA, 21 bp, Homo sapiens
accaattacctgaatagtgaa

SEQ ID NO: 14424 - DNA, 21 bp, Homo sapiens
cagcacgttgatatactttat

SEQ ID NO: 14425 - DNA, 21 bp, Homo sapiens
gtgggtctagatataaatgaa

SEQ ID NO: 14426 - DNA, 21 bp, Homo sapiens
aaggaatagactcatcacata

SEQ ID NO: 14427 - DNA, 21 bp, Homo sapiens
cagcacttatcccaagacaaa

SEQ ID NO: 14428 - DNA, 21 bp, Homo sapiens
cagggcaacctgagataacaa

SEQ ID NO: 14429 - DNA, 21 bp, Homo sapiens
ccagggagagggaaagagtta

SEQ ID NO: 14430 - DNA, 21 bp, Homo sapiens
tggcctggatgcaataaagta

SEQ ID NO: 14431 - DNA, 21 bp, Homo sapiens
tccttggaagtccaaactcta

SEQ ID NO: 14432 - DNA, 21 bp, Homo sapiens
ctgaatggtctttgctaagaa

SEQ ID NO: 14433 - DNA, 21 bp, Homo sapiens
ccctagcatcttggtacccaa

SEQ ID NO: 14434 - DNA, 21 bp, Homo sapiens
caggctggccagaaccatgaa

SEQ ID NO: 14435 - DNA, 21 bp, Homo sapiens
cagaccaagaatagcaggaaa

SEQ ID NO: 14436 - DNA, 21 bp, Homo sapiens
cccgatgttcctcacagtcaa

SEQ ID NO: 14437 - DNA, 21 bp, Homo sapiens
gaggcagcagctgatcagtaa

SEQ ID NO: 14438 - DNA, 21 bp, Homo sapiens
ctgcttgtgcttccagcttaa

SEQ ID NO: 14439 - DNA, 21 bp, Homo sapiens
ctgcatgttgtggacatggaa

SEQ ID NO: 14440 - DNA, 21 bp, Homo sapiens
cacaggtttatttcaaggcaa

SEQ ID NO: 14441 - DNA, 21 bp, Homo sapiens
ccgcctgatgttgttactctt

SEQ ID NO: 14442 - DNA, 21 bp, Homo sapiens
ccgcctgggaacttactacaa

SEQ ID NO: 14443 - DNA, 21 bp, Homo sapiens
cacgctgggttgttaccgcta

SEQ ID NO: 14444 - DNA, 21 bp, Homo sapiens
cacggccgggatcaccatcaa

SEQ ID NO: 14445 - DNA, 21 bp, Homo sapiens
cagggcgaggtctctctggaa

SEQ ID NO: 14446 - DNA, 21 bp, Homo sapiens
gtcccttccaatattaataaa

SEQ ID NO: 14447 - DNA, 21 bp, Homo sapiens
ccgggtggaggagacaggcaa

SEQ ID NO: 14448 - DNA, 21 bp, Homo sapiens
ccagctgatagtgccaatcat

SEQ ID NO: 14449 - DNA, 21 bp, Homo sapiens
aaggccactctcgattcataa

SEQ ID NO: 14450 - DNA, 21 bp, Homo sapiens
ccgcatgatctgggaacctta

SEQ ID NO: 14451 - DNA, 21 bp, Homo sapiens
ccgcactatctacaccatcga

SEQ ID NO: 14452 - DNA, 21 bp, Homo sapiens
tacgtgtgtgcatccaatgaa

SEQ ID NO: 14453 - DNA, 21 bp, Homo sapiens
ctgagcttgaccgttgcataa

SEQ ID NO: 14454 - DNA, 21 bp, Homo sapiens
acagatgctctgaatcatcaa

SEQ ID NO: 14455 - DNA, 21 bp, Homo sapiens
cagccttactttgctcttata

SEQ ID NO: 14456 - DNA, 21 bp, Homo sapiens
caggcttgtatttaatataat

SEQ ID NO: 14457 - DNA, 21 bp, Homo sapiens
cagcttgataatagtctgaca

SEQ ID NO: 14458 - DNA, 21 bp, Homo sapiens
atggatttgacgggatctgaa

SEQ ID NO: 14459 - DNA, 21 bp, Homo sapiens
aaggaagggctttatgagaaa

SEQ ID NO: 14460 - DNA, 21 bp, Homo sapiens
ctggctgatcgttatgatgaa

SEQ ID NO: 14461 - DNA, 21 bp, Homo sapiens
accgctgaaagtcataaccca

SEQ ID NO: 14462 - DNA, 21 bp, Homo sapiens
cactgctaggttgaacatcta

SEQ ID NO: 14463 - DNA, 21 bp, Homo sapiens
caaggacaacctattaccaaa

SEQ ID NO: 14464 - DNA, 21 bp, Homo sapiens
aaggagattgcaactggtcaa

SEQ ID NO: 14465 - DNA, 21 bp, Homo sapiens
ttggaaattgtcaaacattta

SEQ ID NO: 14466 - DNA, 21 bp, Homo sapiens
ctgggttatcagagtaatgaa

SEQ ID NO: 14467 - DNA, 21 bp, Homo sapiens
ccgaaccttaaccagggtgaa

SEQ ID NO: 14468 - DNA, 21 bp, Homo sapiens
aagggagtatctgttaggaga

SEQ ID NO: 14469 - DNA, 21 bp, Homo sapiens
tacggctaacagagacctgaa

SEQ ID NO: 14470 - DNA, 21 bp, Homo sapiens
ccgtagtgagatcacttcata

SEQ ID NO: 14471 - DNA, 21 bp, Homo sapiens
aaagacttccactgcaatata

SEQ ID NO: 14472 - DNA, 21 bp, Homo sapiens
tgggtttctctctcccttgta

SEQ ID NO: 14473 - DNA, 21 bp, Homo sapiens
cagtggagtgatcatctataa

SEQ ID NO: 14474 - DNA, 21 bp, Homo sapiens
gtggttatgattggtaactta

SEQ ID NO: 14475 - DNA, 21 bp, Homo sapiens
accggagatggcagcgattaa

SEQ ID NO: 14476 - DNA, 21 bp, Homo sapiens
aacgctataagcctaatgaca

SEQ ID NO: 14477 - DNA, 21 bp, Homo sapiens
ttggaagatgagaaagaagta

SEQ ID NO: 14478 - DNA, 21 bp, Homo sapiens
caccatttaagatacgtgaaa

SEQ ID NO: 14479 - DNA, 21 bp, Homo sapiens
cacccttatggcatcatggaa

SEQ ID NO: 14480 - DNA, 21 bp, Homo sapiens
cacgaatacaggatgcattaa

SEQ ID NO: 14481 - DNA, 21 bp, Homo sapiens
aacgagtttcatggaaccgaa

SEQ ID NO: 14482 - DNA, 21 bp, Homo sapiens
caggttgacctcaaaggtgta

SEQ ID NO: 14483 - DNA, 21 bp, Homo sapiens
gtggatgattcggaaggtgaa

SEQ ID NO: 14484 - DNA, 21 bp, Homo sapiens
caccagctcattcacggcgaa

SEQ ID NO: 14485 - DNA, 21 bp, Homo sapiens
cccgctcttcttctgagccta

SEQ ID NO: 14486 - DNA, 21 bp, Homo sapiens
caggaaagagtggttatttat

SEQ ID NO: 14487 - DNA, 21 bp, Homo sapiens
ccgctcggatttgtcttctta

SEQ ID NO: 14488 - DNA, 21 bp, Homo sapiens
cagctgtagcgttaacactaa

SEQ ID NO: 14489 - DNA, 21 bp, Homo sapiens
taccactttgctcaacctaaa

SEQ ID NO: 14490 - DNA, 21 bp, Homo sapiens
cagcacttctataatagatca

SEQ ID NO: 14491 - DNA, 21 bp, Homo sapiens
ctcggatcgaataacgataaa

SEQ ID NO: 14492 - DNA, 21 bp, Homo sapiens
ctgcctggtgatggagttcaa

SEQ ID NO: 14493 - DNA, 21 bp, Homo sapiens
cacgtgatccatcctcctaga

SEQ ID NO: 14494 - DNA, 21 bp, Homo sapiens
acggagaatgagggcagccaa

SEQ ID NO: 14495 - DNA, 21 bp, Homo sapiens
tacgaggagcagacagacgaa

SEQ ID NO: 14496 - DNA, 21 bp, Homo sapiens
ctggacagagggcaactataa

SEQ ID NO: 14497 - DNA, 21 bp, Homo sapiens
cgggagcaaagagatgattaa

SEQ ID NO: 14498 - DNA, 21 bp, Homo sapiens
ctgacccataatggacattaa

SEQ ID NO: 14499 - DNA, 21 bp, Homo sapiens
accactcaagaccaaatggaa

SEQ ID NO: 14500 - DNA, 21 bp, Homo sapiens
gacgcctgatattgaagtaaa

SEQ ID NO: 14501 - DNA, 21 bp, Homo sapiens
aaacatgtacactatcatgaa

SEQ ID NO: 14502 - DNA, 21 bp, Homo sapiens
ccgcgagaagttggcgctgta

SEQ ID NO: 14503 - DNA, 21 bp, Homo sapiens
acaggcaaccacaggtttaaa

SEQ ID NO: 14504 - DNA, 21 bp, Homo sapiens
ccagaaggaggtgacaggcaa

SEQ ID NO: 14505 - DNA, 21 bp, Homo sapiens
aaccagcataaagcaaatgaa

SEQ ID NO: 14506 - DNA, 21 bp, Homo sapiens
caggtttaataaggacacgaa

SEQ ID NO: 14507 - DNA, 21 bp, Homo sapiens
ctggttctgtttgtttctcaa

SEQ ID NO: 14508 - DNA, 21 bp, Homo sapiens
ctgcacattcatgatcagaaa

SEQ ID NO: 14509 - DNA, 21 bp, Homo sapiens
aaggctgtacagattcaccaa

SEQ ID NO: 14510 - DNA, 21 bp, Homo sapiens
cgggatgaaatggctcatgta

SEQ ID NO: 14511 - DNA, 21 bp, Homo sapiens
ctcctataggaagtatcgcaa

SEQ ID NO: 14512 - DNA, 21 bp, Homo sapiens
ctgactgattctcatcgggta

SEQ ID NO: 14513 - DNA, 21 bp, Homo sapiens
atccttgaatttgcaagtgaa

SEQ ID NO: 14514 - DNA, 21 bp, Homo sapiens
aacagacaagactgaaattaa

SEQ ID NO: 14515 - DNA, 21 bp, Homo sapiens
cacagtatcaatatttcatta

SEQ ID NO: 14516 - DNA, 21 bp, Homo sapiens
aaccacttatttattgaataa

SEQ ID NO: 14517 - DNA, 21 bp, Homo sapiens
taccatttgctgggcatatta

SEQ ID NO: 14518 - DNA, 21 bp, Homo sapiens
agggttcatcatgctcaggaa

SEQ ID NO: 14519 - DNA, 21 bp, Homo sapiens
ctcatcataatcaccattcaa

SEQ ID NO: 14520 - DNA, 21 bp, Homo sapiens
atggcagtagacagatacata

SEQ ID NO: 14521 - DNA, 21 bp, Homo sapiens
cccatctttgataccttcata

SEQ ID NO: 14522 - DNA, 21 bp, Homo sapiens
caccttcatcctctcagatta

SEQ ID NO: 14523 - DNA, 21 bp, Homo sapiens
aagacacaatacggacactaa

SEQ ID NO: 14524 - DNA, 21 bp, Homo sapiens
cagcttatttaagatccagaa

SEQ ID NO: 14525 - DNA, 21 bp, Homo sapiens
tcagatacagttctcccttaa

SEQ ID NO: 14526 - DNA, 21 bp, Homo sapiens
caccgtgtgtctatcctcata

SEQ ID NO: 14527 - DNA, 21 bp, Homo sapiens
cggcaccattgtcatccagta

SEQ ID NO: 14528 - DNA, 21 bp, Homo sapiens
accgaatgtcatcacctggaa

SEQ ID NO: 14529 - DNA, 21 bp, Homo sapiens
caggctgatgaggtacaatga

SEQ ID NO: 14530 - DNA, 21 bp, Homo sapiens
ctggatgaacacggtggtgaa

SEQ ID NO: 14531 - DNA, 21 bp, Homo sapiens
ctggacacataaagcaagtta

SEQ ID NO: 14532 - DNA, 21 bp, Homo sapiens
cacggagatgctggacacata

SEQ ID NO: 14533 - DNA, 21 bp, Homo sapiens
ccggacttgagtctgagttca

SEQ ID NO: 14534 - DNA, 21 bp, Homo sapiens
cggagatgctggacacataaa

SEQ ID NO: 14535 - DNA, 21 bp, Homo sapiens
ctggagcagaggagccattat

SEQ ID NO: 14536 - DNA, 21 bp, Homo sapiens
ttgaataaatgtacactatta

SEQ ID NO: 14537 - DNA, 21 bp, Homo sapiens
cccgccttcaaatactatgaa

SEQ ID NO: 14538 - DNA, 21 bp, Homo sapiens
ccggcgcaacgaggatctcta

SEQ ID NO: 14539 - DNA, 21 bp, Homo sapiens
cccgtagtagctggagttatt

SEQ ID NO: 14540 - DNA, 21 bp, Homo sapiens
ctcgccttctaagaacctcaa

SEQ ID NO: 14541 - DNA, 21 bp, Homo sapiens
cacgtcatatacagcctacaa

SEQ ID NO: 14542 - DNA, 21 bp, Homo sapiens
atgcagtaatatgtgacctaa

SEQ ID NO: 14543 - DNA, 21 bp, Homo sapiens
aacccacaatatggacagaaa

SEQ ID NO: 14544 - DNA, 21 bp, Homo sapiens
caggaatattgggatactgta

SEQ ID NO: 14545 - DNA, 21 bp, Homo sapiens
aaggctttgtgactaactcaa

SEQ ID NO: 14546 - DNA, 21 bp, Homo sapiens
cccgcccagatataaatataa

SEQ ID NO: 14547 - DNA, 21 bp, Homo sapiens
cagaatcatggcgtctaccta

SEQ ID NO: 14548 - DNA, 21 bp, Homo sapiens
tccctatggcttagagttgta

SEQ ID NO: 14549 - DNA, 21 bp, Homo sapiens
tggcttagagttgtagactta

SEQ ID NO: 14550 - DNA, 21 bp, Homo sapiens
ccgaagggagttgattggaca

SEQ ID NO: 14551 - DNA, 21 bp, Homo sapiens
ctggcctcccttaaacctgaa

SEQ ID NO: 14552 - DNA, 21 bp, Homo sapiens
ccggacctcagtggacatcat

SEQ ID NO: 14553 - DNA, 21 bp, Homo sapiens
ctggctgggaagggcagtcaa

SEQ ID NO: 14554 - DNA, 21 bp, Homo sapiens
cagcttagatttacaggagaa

SEQ ID NO: 14555 - DNA, 21 bp, Homo sapiens
ctccggagactcaatcttcaa

SEQ ID NO: 14556 - DNA, 21 bp, Homo sapiens
caggatgatctcagaggccat

SEQ ID NO: 14557 - DNA, 21 bp, Homo sapiens
acggtctaatttgtgtagtaa

SEQ ID NO: 14558 - DNA, 21 bp, Homo sapiens
aaccatgtgcatacaacttaa

SEQ ID NO: 14559 - DNA, 21 bp, Homo sapiens
caggactacttcatgagccaa

SEQ ID NO: 14560 - DNA, 21 bp, Homo sapiens
cccactgggttgtgaaatgaa

SEQ ID NO: 14561 - DNA, 21 bp, Homo sapiens
cagcagtgggtgagcagccaa

SEQ ID NO: 14562 - DNA, 21 bp, Homo sapiens
cagcctcagtttgccatctat

SEQ ID NO: 14563 - DNA, 21 bp, Homo sapiens
atggatgtgcaagaccttgaa

SEQ ID NO: 14564 - DNA, 21 bp, Homo sapiens
atccttcactttaatttataa

SEQ ID NO: 14565 - DNA, 21 bp, Homo sapiens
cgcgaggagcatatcgacaaa

SEQ ID NO: 14566 - DNA, 21 bp, Homo sapiens
cacatactgtgtggacaataa

SEQ ID NO: 14567 - DNA, 21 bp, Homo sapiens
ctggtgtatccttcacatcta

SEQ ID NO: 14568 - DNA, 21 bp, Homo sapiens
ccggacctatgtggcaaggaa

SEQ ID NO: 14569 - DNA, 21 bp, Homo sapiens
acccatctgtgtagccaagaa

SEQ ID NO: 14570 - DNA, 21 bp, Homo sapiens
ctggaacttgtgactgtcaaa

SEQ ID NO: 14571 - DNA, 21 bp, Homo sapiens
caggacttcattcacctctca

SEQ ID NO: 14572 - DNA, 21 bp, Homo sapiens
ccggccaatgagtgacttcaa

SEQ ID NO: 14573 - DNA, 21 bp, Homo sapiens
ccgctttaagcaggccaccaa

SEQ ID NO: 14574 - DNA, 21 bp, Homo sapiens
cagggttattctatggagtat

SEQ ID NO: 14575 - DNA, 21 bp, Homo sapiens
acccacgaaagtacaagatca

SEQ ID NO: 14576 - DNA, 21 bp, Homo sapiens
ccgcatctgaagttacccaaa

SEQ ID NO: 14577 - DNA, 21 bp, Homo sapiens
aagcagtatgctcccgatcaa

SEQ ID NO: 14578 - DNA, 21 bp, Homo sapiens
caatgtattaatgaaatgaaa

SEQ ID NO: 14579 - DNA, 21 bp, Homo sapiens
tagcgttcctgcttcttgcaa

SEQ ID NO: 14580 - DNA, 21 bp, Homo sapiens
ccggacgttgttgcaaaggag

SEQ ID NO: 14581 - DNA, 21 bp, Homo sapiens
cagcaaatctctagaaattta

SEQ ID NO: 14582 - DNA, 21 bp, Homo sapiens
aaggagtagctttgacattaa

SEQ ID NO: 14583 - DNA, 21 bp, Homo sapiens
ccggatcgagaaggtcatcta

SEQ ID NO: 14584 - DNA, 21 bp, Homo sapiens
ccggctctatgaaaccttcaa

SEQ ID NO: 14585 - DNA, 21 bp, Homo sapiens
aagacatgcagtctcattgaa

SEQ ID NO: 14586 - DNA, 21 bp, Homo sapiens
tccctggagctcagaagccaa

SEQ ID NO: 14587 - DNA, 21 bp, Homo sapiens
aagaagaaacttgaaagattt

SEQ ID NO: 14588 - DNA, 21 bp, Homo sapiens
ccgggagaagctgaaattgga

SEQ ID NO: 14589 - DNA, 21 bp, Homo sapiens
agccaccatgctgacaagtaa

SEQ ID NO: 14590 - DNA, 21 bp, Homo sapiens
caggtagtctgtggagcatta

SEQ ID NO: 14591 - DNA, 21 bp, Homo sapiens
accatgtttcttgacatggaa

SEQ ID NO: 14592 - DNA, 21 bp, Homo sapiens
aaacagtatattaaccctaaa

SEQ ID NO: 14593 - DNA, 21 bp, Homo sapiens
ctcctttgcctggctcctgaa

SEQ ID NO: 14594 - DNA, 21 bp, Homo sapiens
cggtctttgctcctttacaaa

SEQ ID NO: 14595 - DNA, 21 bp, Homo sapiens
caggcctgttgcagtctccaa

SEQ ID NO: 14596 - DNA, 21 bp, Homo sapiens
ccgggatatatcagccatgat

SEQ ID NO: 14597 - DNA, 21 bp, Homo sapiens
aagggagttccttacttacta

SEQ ID NO: 14598 - DNA, 21 bp, Homo sapiens
aagggagttccttacttacta

SEQ ID NO: 14599 - DNA, 21 bp, Homo sapiens
aaccaataaatttctgttgaa

SEQ ID NO: 14600 - DNA, 21 bp, Homo sapiens
aagggatttctgagttctcaa

SEQ ID NO: 14601 - DNA, 21 bp, Homo sapiens
agggtacttccttgaacataa

SEQ ID NO: 14602 - DNA, 21 bp, Homo sapiens
taccaccagaataacccttaa

SEQ ID NO: 14603 - DNA, 21 bp, Homo sapiens
cagtgttaactttaaggtata

SEQ ID NO: 14604 - DNA, 21 bp, Homo sapiens
tccgcttgaattattctgtta

SEQ ID NO: 14605 - DNA, 21 bp, Homo sapiens
ccgcatataaatgggccttga

SEQ ID NO: 14606 - DNA, 21 bp, Homo sapiens
cggaaccttattatttatgaa

SEQ ID NO: 14607 - DNA, 21 bp, Homo sapiens
ctgggtcctccaggacctgaa

SEQ ID NO: 14608 - DNA, 21 bp, Homo sapiens
ctgggagatgctcaagtttga

SEQ ID NO: 14609 - DNA, 21 bp, Homo sapiens
ccgctacttccttatggctaa

SEQ ID NO: 14610 - DNA, 21 bp, Homo sapiens
aaggcctttgctgagcagata

SEQ ID NO: 14611 - DNA, 21 bp, Homo sapiens
cagaccaatgctgctgacaaa

SEQ ID NO: 14612 - DNA, 21 bp, Homo sapiens
tagcccatccatggaaataaa

SEQ ID NO: 14613 - DNA, 21 bp, Homo sapiens
cacctcgttggtgaactacaa

SEQ ID NO: 14614 - DNA, 21 bp, Homo sapiens
agggaagaactcggtattcca

SEQ ID NO: 14615 - DNA, 21 bp, Homo sapiens
caggtggtcaagttcacagaa

SEQ ID NO: 14616 - DNA, 21 bp, Homo sapiens
aaggaaagaaagcgaaggcaa

SEQ ID NO: 14617 - DNA, 21 bp, Homo sapiens
tacctgaaacaatcaattaaa

SEQ ID NO: 14618 - DNA, 21 bp, Homo sapiens
acgatgtaattgtcaacataa

SEQ ID NO: 14619 - DNA, 21 bp, Homo sapiens
cccgctcaggaggaattacaa

SEQ ID NO: 14620 - DNA, 21 bp, Homo sapiens
taggcagttcttggcagaata

SEQ ID NO: 14621 - DNA, 21 bp, Homo sapiens
tacgttgatgacgtaaagaaa

SEQ ID NO: 14622 - DNA, 21 bp, Homo sapiens
caggatcatgcttgaacttta

SEQ ID NO: 14623 - DNA, 21 bp, Homo sapiens
aacagtaatgactacaataaa

SEQ ID NO: 14624 - DNA, 21 bp, Homo sapiens
ctggagatacctggaaatgaa

SEQ ID NO: 14625 - DNA, 21 bp, Homo sapiens
caacataagattcgagttaaa

SEQ ID NO: 14626 - DNA, 21 bp, Homo sapiens
cagcgatatctgtcaatatat

SEQ ID NO: 14627 - DNA, 21 bp, Homo sapiens
gccaggttcaataatacctaa

SEQ ID NO: 14628 - DNA, 21 bp, Homo sapiens
cagccatgagaacgtcaaata

SEQ ID NO: 14629 - DNA, 21 bp, Homo sapiens
cgggcagtgctgctacatcaa

SEQ ID NO: 14630 - DNA, 21 bp, Homo sapiens
caggagttctcacgcagggaa

SEQ ID NO: 14631 - DNA, 21 bp, Homo sapiens
ctgagctatgtttgtaatgca

SEQ ID NO: 14632 - DNA, 21 bp, Homo sapiens
agggaagctgtacaccactaa

SEQ ID NO: 14633 - DNA, 21 bp, Homo sapiens
tcccaagtgttgagaatccaa

SEQ ID NO: 14634 - DNA, 21 bp, Homo sapiens
caggagagcctaggactcaaa

SEQ ID NO: 14635 - DNA, 21 bp, Homo sapiens
cacgattgtggtcaccttgaa

SEQ ID NO: 14636 - DNA, 21 bp, Homo sapiens
caaggtttgcaagctaagaaa

SEQ ID NO: 14637 - DNA, 21 bp, Homo sapiens
gtgcctgattgccacactaaa

SEQ ID NO: 14638 - DNA, 21 bp, Homo sapiens
cagaacatcgttctaatacca

SEQ ID NO: 14639 - DNA, 21 bp, Homo sapiens
ctggtgctcagttgtatgcaa

SEQ ID NO: 14640 - DNA, 21 bp, Homo sapiens
aatgatgaagttggaaatgaa

SEQ ID NO: 14641 - DNA, 21 bp, Homo sapiens
cacatggtgtgtgggatacaa

SEQ ID NO: 14642 - DNA, 21 bp, Homo sapiens
caggtggcaagtgggcatata

SEQ ID NO: 14643 - DNA, 21 bp, Homo sapiens
cagcatgttcagagtactcca

SEQ ID NO: 14644 - DNA, 21 bp, Homo sapiens
cgggcagatatcattctacaa

SEQ ID NO: 14645 - DNA, 21 bp, Homo sapiens
aaagttgaggttatcctgtaa

SEQ ID NO: 14646 - DNA, 21 bp, Homo sapiens
ctcttagtttgtaatttaata

SEQ ID NO: 14647 - DNA, 21 bp, Homo sapiens
agggtaccacttattcttcaa

SEQ ID NO: 14648 - DNA, 21 bp, Homo sapiens
acggacccatatactttataa

SEQ ID NO: 14649 - DNA, 21 bp, Homo sapiens
gaggagatatttcatcaaata

SEQ ID NO: 14650 - DNA, 21 bp, Homo sapiens
aaggcatataaagaaactcaa

SEQ ID NO: 14651 - DNA, 21 bp, Homo sapiens
ctgagtggatttggaaactga

SEQ ID NO: 14652 - DNA, 21 bp, Homo sapiens
aaggagctcgttgaaatatca

SEQ ID NO: 14653 - DNA, 21 bp, Homo sapiens
ccgcttgcacgtctcacataa

SEQ ID NO: 14654 - DNA, 21 bp, Homo sapiens
ctggatagggtctttaataca

SEQ ID NO: 14655 - DNA, 21 bp, Homo sapiens
ccctatttgattgatcattat

SEQ ID NO: 14656 - DNA, 21 bp, Homo sapiens
tagggtctttaatacactcta

SEQ ID NO: 14657 - DNA, 21 bp, Homo sapiens
ttcaaagttgtttacttataa

SEQ ID NO: 14658 - DNA, 21 bp, Homo sapiens
cagtgacatcaataacatata

SEQ ID NO: 14659 - DNA, 21 bp, Homo sapiens
tagcgtaaacatcacgactga

SEQ ID NO: 14660 - DNA, 21 bp, Homo sapiens
aacgttgatgaggaataaatt

SEQ ID NO: 14661 - DNA, 21 bp, Homo sapiens
caagtttgttctagatttcaa

SEQ ID NO: 14662 - DNA, 21 bp, Homo sapiens
caggttatcaataaagtatat

SEQ ID NO: 14663 - DNA, 21 bp, Homo sapiens
cagatggccctctttatacta

SEQ ID NO: 14664 - DNA, 21 bp, Homo sapiens
tacgacattgaaatcatgata

SEQ ID NO: 14665 - DNA, 21 bp, Homo sapiens
caccatcgtcttggtgtccta

SEQ ID NO: 14666 - DNA, 21 bp, Homo sapiens
aagactgttgaggaatctaaa

SEQ ID NO: 14667 - DNA, 21 bp, Homo sapiens
aaggagaaggctactgatgaa

SEQ ID NO: 14668 - DNA, 21 bp, Homo sapiens
caggagatgactggcaggaaa

SEQ ID NO: 14669 - DNA, 21 bp, Homo sapiens
cagggtgtcagggcacacgaa

SEQ ID NO: 14670 - DNA, 21 bp, Homo sapiens
caggaggatcgtttgagaata

SEQ ID NO: 14671 - DNA, 21 bp, Homo sapiens
aaggatcttgttcgagtagaa

SEQ ID NO: 14672 - DNA, 21 bp, Homo sapiens
ctgatcttaattggaaatgaa

SEQ ID NO: 14673 - DNA, 21 bp, Homo sapiens
ggcggtgttctccatcctgaa

SEQ ID NO: 14674 - DNA, 21 bp, Homo sapiens
aaggcattatcagtgagcaaa

SEQ ID NO: 14675 - DNA, 21 bp, Homo sapiens
taaggcattatcagtgagcaa

SEQ ID NO: 14676 - DNA, 21 bp, Homo sapiens
caggagaagaaagatctgttt

SEQ ID NO: 14677 - DNA, 21 bp, Homo sapiens
atggacgaagttggagttcaa

SEQ ID NO: 14678 - DNA, 21 bp, Homo sapiens
caccgtgaacttcaaatttga

SEQ ID NO: 14679 - DNA, 21 bp, Homo sapiens
caaggctaccacagaaggtta

SEQ ID NO: 14680 - DNA, 21 bp, Homo sapiens
ccggaatcctccagaatggaa

SEQ ID NO: 14681 - DNA, 21 bp, Homo sapiens
aaggacaaggctaccacagaa

SEQ ID NO: 14682 - DNA, 21 bp, Homo sapiens
cgccttcagcgcagacttcaa

SEQ ID NO: 14683 - DNA, 21 bp, Homo sapiens
aagctgcttgttcccacccaa

SEQ ID NO: 14684 - DNA, 21 bp, Homo sapiens
cacaggcagaatcttctataa

SEQ ID NO: 14685 - DNA, 21 bp, Homo sapiens
atggctgaatactccaaataa

SEQ ID NO: 14686 - DNA, 21 bp, Homo sapiens
aaggagtgactgtgcatataa

SEQ ID NO: 14687 - DNA, 21 bp, Homo sapiens
cagatggaaactggtaattat

SEQ ID NO: 14688 - DNA, 21 bp, Homo sapiens
aggcaagttattcatcacaaa

SEQ ID NO: 14689 - DNA, 21 bp, Homo sapiens
caggatagaaagacatcacta

SEQ ID NO: 14690 - DNA, 21 bp, Homo sapiens
ctggtttattgctcctattta

SEQ ID NO: 14691 - DNA, 21 bp, Homo sapiens
atcgtatgaacagttatttaa

SEQ ID NO: 14692 - DNA, 21 bp, Homo sapiens
tacgccaaacctggatattta

SEQ ID NO: 14693 - DNA, 21 bp, Homo sapiens
aaccataatttggtgcattaa

SEQ ID NO: 14694 - DNA, 21 bp, Homo sapiens
ctgagcaacatgaaagattaa

SEQ ID NO: 14695 - DNA, 21 bp, Homo sapiens
ccagtagaagttcagaagtta

SEQ ID NO: 14696 - DNA, 21 bp, Homo sapiens
ctgactgttgatgggaatgaa

SEQ ID NO: 14697 - DNA, 21 bp, Homo sapiens
taggttagatatagacactaa

SEQ ID NO: 14698 - DNA, 21 bp, Homo sapiens
taggatttatttggtattaat

SEQ ID NO: 14699 - DNA, 21 bp, Homo sapiens
aaacaaggaaataaaggctta

SEQ ID NO: 14700 - DNA, 21 bp, Homo sapiens
cgggaaggtcgtggtgctgat

SEQ ID NO: 14701 - DNA, 21 bp, Homo sapiens
ctgctagagtctacagaagta

SEQ ID NO: 14702 - DNA, 21 bp, Homo sapiens
tccagcgggattgacactcaa

SEQ ID NO: 14703 - DNA, 21 bp, Homo sapiens
tgggaattagtggatgctaaa

SEQ ID NO: 14704 - DNA, 21 bp, Homo sapiens
tggatgctaaatggcaattaa

SEQ ID NO: 14705 - DNA, 21 bp, Homo sapiens
ttgcttatggcttacaaataa

SEQ ID NO: 14706 - DNA, 21 bp, Homo sapiens
tacgaggaacaaaggaatgaa

SEQ ID NO: 14707 - DNA, 21 bp, Homo sapiens
aagtacctatgtagaacctaa

SEQ ID NO: 14708 - DNA, 21 bp, Homo sapiens
cagggaatcttgagcccgaaa

SEQ ID NO: 14709 - DNA, 21 bp, Homo sapiens
caccacggattcagttactaa

SEQ ID NO: 14710 - DNA, 21 bp, Homo sapiens
caagacactcgtcactattaa

SEQ ID NO: 14711 - DNA, 21 bp, Homo sapiens
ctcgtcactattaattcggaa

SEQ ID NO: 14712 - DNA, 21 bp, Homo sapiens
cagaagcagtttaatggatta

SEQ ID NO: 14713 - DNA, 21 bp, Homo sapiens
aagaatcactatggaaccaaa

SEQ ID NO: 14714 - DNA, 21 bp, Homo sapiens
cacgcacatttgagatgagaa

SEQ ID NO: 14715 - DNA, 21 bp, Homo sapiens
cagagaggatataacttatca

SEQ ID NO: 14716 - DNA, 21 bp, Homo sapiens
atcgctatcatctttaggcaa

SEQ ID NO: 14717 - DNA, 21 bp, Homo sapiens
cagggacatgctgtactacaa

SEQ ID NO: 14718 - DNA, 21 bp, Homo sapiens
cacggtgattacagcaacata

SEQ ID NO: 14719 - DNA, 21 bp, Homo sapiens
cgggcgtgtctacaacatcta

SEQ ID NO: 14720 - DNA, 21 bp, Homo sapiens
aagcggctttgtttcagccta

SEQ ID NO: 14721 - DNA, 21 bp, Homo sapiens
aggcatgggtctcgaatctta

SEQ ID NO: 14722 - DNA, 21 bp, Homo sapiens
agcggctttgtttcagcctaa

SEQ ID NO: 14723 - DNA, 21 bp, Homo sapiens
ctcaaggtgcattacccgaaa

SEQ ID NO: 14724 - DNA, 21 bp, Homo sapiens
ttccattatcggagtcaataa

SEQ ID NO: 14725 - DNA, 21 bp, Homo sapiens
cccgcaatcattagcttcttt

SEQ ID NO: 14726 - DNA, 21 bp, Homo sapiens
caacaagatttcttcaataaa

SEQ ID NO: 14727 - DNA, 21 bp, Homo sapiens
ctcctattaaacatttgttta

SEQ ID NO: 14728 - DNA, 21 bp, Homo sapiens
ctggtttatcagccacactta

SEQ ID NO: 14729 - DNA, 21 bp, Homo sapiens
atggaggaccattcccagtta

SEQ ID NO: 14730 - DNA, 21 bp, Homo sapiens
cccagataccctagaatataa

SEQ ID NO: 14731 - DNA, 21 bp, Homo sapiens
cacagaaggtatagtagattt

SEQ ID NO: 14732 - DNA, 21 bp, Homo sapiens
cacgacagtgacagagtttaa

SEQ ID NO: 14733 - DNA, 21 bp, Homo sapiens
cagcctttcaccatactggaa

SEQ ID NO: 14734 - DNA, 21 bp, Homo sapiens
cagcctttcaccatactggaa

SEQ ID NO: 14735 - DNA, 21 bp, Homo sapiens
caccgtaaccacagtcaggaa

SEQ ID NO: 14736 - DNA, 21 bp, Homo sapiens
cgctgaaataatgactatcaa

SEQ ID NO: 14737 - DNA, 21 bp, Homo sapiens
caggtaaatggtctggtgcta

SEQ ID NO: 14738 - DNA, 21 bp, Homo sapiens
aggctctcactttaacattaa

SEQ ID NO: 14739 - DNA, 21 bp, Homo sapiens
taggctctcactttaacatta

SEQ ID NO: 14740 - DNA, 21 bp, Homo sapiens
taggagaatgttcccactata

SEQ ID NO: 14741 - DNA, 21 bp, Homo sapiens
cagcgttaccatcgatgacaa

SEQ ID NO: 14742 - DNA, 21 bp, Homo sapiens
agcgagaaagctacaaattta

SEQ ID NO: 14743 - DNA, 21 bp, Homo sapiens
aagattgtcaagaaccattaa

SEQ ID NO: 14744 - DNA, 21 bp, Homo sapiens
acggtcccaactcctctctaa

SEQ ID NO: 14745 - DNA, 21 bp, Homo sapiens
cggcaagtgcttcacacagaa

SEQ ID NO: 14746 - DNA, 21 bp, Homo sapiens
cagccagttcattgagcccaa

SEQ ID NO: 14747 - DNA, 21 bp, Homo sapiens
aacctatttcatcactctaaa

SEQ ID NO: 14748 - DNA, 21 bp, Homo sapiens
ttgggtgataggacactttaa

SEQ ID NO: 14749 - DNA, 21 bp, Homo sapiens
agggactaaatatgactttaa

SEQ ID NO: 14750 - DNA, 21 bp, Homo sapiens
atcgatgcggtatgaaaccaa

SEQ ID NO: 14751 - DNA, 21 bp, Homo sapiens
tagtagctaataagagagtta

SEQ ID NO: 14752 - DNA, 21 bp, Homo sapiens
taggagcgtggcagtgggtaa

SEQ ID NO: 14753 - DNA, 21 bp, Homo sapiens
aaggttaatgataatgtggtt

SEQ ID NO: 14754 - DNA, 21 bp, Homo sapiens
aacgatatattgctagtttca

SEQ ID NO: 14755 - DNA, 21 bp, Homo sapiens
aaggtaaatggtaatgactaa

SEQ ID NO: 14756 - DNA, 21 bp, Homo sapiens
aagggtttcatttctgtttaa

SEQ ID NO: 14757 - DNA, 21 bp, Homo sapiens
cacattcatcttaacattgaa

SEQ ID NO: 14758 - DNA, 21 bp, Homo sapiens
ctggttgaagctggtaatcaa

SEQ ID NO: 14759 - DNA, 21 bp, Homo sapiens
acgacctattagagtaatcta

SEQ ID NO: 14760 - DNA, 21 bp, Homo sapiens
caacagctaaacagtcataaa

SEQ ID NO: 14761 - DNA, 21 bp, Homo sapiens
acgcaactagttggtgcataa

SEQ ID NO: 14762 - DNA, 21 bp, Homo sapiens
atgagccttattgacaattaa

SEQ ID NO: 14763 - DNA, 21 bp, Homo sapiens
ctggtggaaatcgctcaccaa

SEQ ID NO: 14764 - DNA, 21 bp, Homo sapiens
cccgaatcacttggcaaataa

SEQ ID NO: 14765 - DNA, 21 bp, Homo sapiens
tacatttgaccctgaggttaa

SEQ ID NO: 14766 - DNA, 21 bp, Homo sapiens
caacatggaatttgcaagtaa

SEQ ID NO: 14767 - DNA, 21 bp, Homo sapiens
aaggaccagggacacagctaa

SEQ ID NO: 14768 - DNA, 21 bp, Homo sapiens
atggcaaggatgcgtcctcaa

SEQ ID NO: 14769 - DNA, 21 bp, Homo sapiens
cacagctaactaacttattca

SEQ ID NO: 14770 - DNA, 21 bp, Homo sapiens
gacggtcaatgacaacctgaa

SEQ ID NO: 14771 - DNA, 21 bp, Homo sapiens
cagggaggttatgaggcttaa

SEQ ID NO: 14772 - DNA, 21 bp, Homo sapiens
cacgcagaagtcagaatcaaa

SEQ ID NO: 14773 - DNA, 21 bp, Homo sapiens
caggttgtactccatgagaat

SEQ ID NO: 14774 - DNA, 21 bp, Homo sapiens
aggaaattaatgcaaattcaa

SEQ ID NO: 14775 - DNA, 21 bp, Homo sapiens
cacgcagattgtgaaggataa

SEQ ID NO: 14776 - DNA, 21 bp, Homo sapiens
acccagtttaataatgacaaa

SEQ ID NO: 14777 - DNA, 21 bp, Homo sapiens
cagaattatgggtatgatgta

SEQ ID NO: 14778 - DNA, 21 bp, Homo sapiens
taagattaacttgaagttcta

SEQ ID NO: 14779 - DNA, 21 bp, Homo sapiens
aagcacttggaggaaggccta

SEQ ID NO: 14780 - DNA, 21 bp, Homo sapiens
cagcactgatctggcatccca

SEQ ID NO: 14781 - DNA, 21 bp, Homo sapiens
cccattctacaaagtcttatt

SEQ ID NO: 14782 - DNA, 21 bp, Homo sapiens
cagaggagtgctgtggagaaa

SEQ ID NO: 14783 - DNA, 21 bp, Homo sapiens
cggatgctcattagaggttaa

SEQ ID NO: 14784 - DNA, 21 bp, Homo sapiens
aacattcgcattggaattgaa

SEQ ID NO: 14785 - DNA, 21 bp, Homo sapiens
tagcatcactgtggaaattaa

SEQ ID NO: 14786 - DNA, 21 bp, Homo sapiens
ccggtctgaagtcatctataa

SEQ ID NO: 14787 - DNA, 21 bp, Homo sapiens
aagcagcagttcagattccaa

SEQ ID NO: 14788 - DNA, 21 bp, Homo sapiens
aaagagaaagatgacaagtaa

SEQ ID NO: 14789 - DNA, 21 bp, Homo sapiens
cagatgctctttctcctcgga

SEQ ID NO: 14790 - DNA, 21 bp, Homo sapiens
ggagctggacatgaagatcaa

SEQ ID NO: 14791 - DNA, 21 bp, Homo sapiens
cagaacgaagatgccagccaa

SEQ ID NO: 14792 - DNA, 21 bp, Homo sapiens
ccggacggcagcatgtatgaa

SEQ ID NO: 14793 - DNA, 21 bp, Homo sapiens
accgagaacattcgtccaaat

SEQ ID NO: 14794 - DNA, 21 bp, Homo sapiens
ctggatgctgaaagactttaa

SEQ ID NO: 14795 - DNA, 21 bp, Homo sapiens
aagaaagtgaagtatactata

SEQ ID NO: 14796 - DNA, 21 bp, Homo sapiens
caggtgcagaacaacatgtaa

SEQ ID NO: 14797 - DNA, 21 bp, Homo sapiens
cacagtgtacctcgtcaggaa

SEQ ID NO: 14798 - DNA, 21 bp, Homo sapiens
cccgtccatctacaagctgaa

SEQ ID NO: 14799 - DNA, 21 bp, Homo sapiens
aagacgtgttaagttaaagaa

SEQ ID NO: 14800 - DNA, 21 bp, Homo sapiens
cagactattattcggccatta

SEQ ID NO: 14801 - DNA, 21 bp, Homo sapiens
cacgttgtatgatttcgttta

SEQ ID NO: 14802 - DNA, 21 bp, Homo sapiens
cccgctttgtctaatttagaa

SEQ ID NO: 14803 - DNA, 21 bp, Homo sapiens
caccattaacaaggacaccaa

SEQ ID NO: 14804 - DNA, 21 bp, Homo sapiens
tccggaagaggcctcttatta

SEQ ID NO: 14805 - DNA, 21 bp, Homo sapiens
caggtgaaactgcgatagaaa

SEQ ID NO: 14806 - DNA, 21 bp, Homo sapiens
cagaggaaccttatattgaaa

SEQ ID NO: 14807 - DNA, 21 bp, Homo sapiens
caaggtcatcattgtcatcta

SEQ ID NO: 14808 - DNA, 21 bp, Homo sapiens
ccggatgcatatactgagcaa

SEQ ID NO: 14809 - DNA, 21 bp, Homo sapiens
agggaagagactcatagtaaa

SEQ ID NO: 14810 - DNA, 21 bp, Homo sapiens
atggatgatcatcttaatata

SEQ ID NO: 14811 - DNA, 21 bp, Homo sapiens
aagaactgaactattattaaa

SEQ ID NO: 14812 - DNA, 21 bp, Homo sapiens
cagcaatttattgaacactaa

SEQ ID NO: 14813 - DNA, 21 bp, Homo sapiens
caggcatggaagctacatata

SEQ ID NO: 14814 - DNA, 21 bp, Homo sapiens
aagaaggagtttagtttagaa

SEQ ID NO: 14815 - DNA, 21 bp, Homo sapiens
aaggaaatcgagcttaatgaa

SEQ ID NO: 14816 - DNA, 21 bp, Homo sapiens
cacccaattcaacttaataaa

SEQ ID NO: 14817 - DNA, 21 bp, Homo sapiens
cagattagatatagccctaaa

SEQ ID NO: 14818 - DNA, 21 bp, Homo sapiens
cagaatattattaaacaatca

SEQ ID NO: 14819 - DNA, 21 bp, Homo sapiens
cagaaataatgttaaatagaa

SEQ ID NO: 14820 - DNA, 21 bp, Homo sapiens
atggctcaacataaactataa

SEQ ID NO: 14821 - DNA, 21 bp, Homo sapiens
acggagaaacagcggatgaaa

SEQ ID NO: 14822 - DNA, 21 bp, Homo sapiens
taggtgctcaagggaagttta

SEQ ID NO: 14823 - DNA, 21 bp, Homo sapiens
cacgtttagtatattaagaca

SEQ ID NO: 14824 - DNA, 21 bp, Homo sapiens
ccgggtgatcccgaaaggtta

SEQ ID NO: 14825 - DNA, 21 bp, Homo sapiens
acagaatttggtaaagttaaa

SEQ ID NO: 14826 - DNA, 21 bp, Homo sapiens
ctggatgaatgtagagagaaa

SEQ ID NO: 14827 - DNA, 21 bp, Homo sapiens
cagcattgacttagagctaca

SEQ ID NO: 14828 - DNA, 21 bp, Homo sapiens
cagaatgatgccttaatctta

SEQ ID NO: 14829 - DNA, 21 bp, Homo sapiens
ctggcacagccgattcccaaa

SEQ ID NO: 14830 - DNA, 21 bp, Homo sapiens
ctgcgagaagaggaagcctta

SEQ ID NO: 14831 - DNA, 21 bp, Homo sapiens
cagggttagaagctgatacaa

SEQ ID NO: 14832 - DNA, 21 bp, Homo sapiens
acccgtaagacagaaattata

SEQ ID NO: 14833 - DNA, 21 bp, Homo sapiens
cgcgggcacgcgagcgtttaa

SEQ ID NO: 14834 - DNA, 21 bp, Homo sapiens
ctggtgcaaacttgccttcta

SEQ ID NO: 14835 - DNA, 21 bp, Homo sapiens
acggagcttgatgaagccaga

SEQ ID NO: 14836 - DNA, 21 bp, Homo sapiens
cacggtgtcctgatgaaggaa

SEQ ID NO: 14837 - DNA, 21 bp, Homo sapiens
cacatccatcatgaacaggaa

SEQ ID NO: 14838 - DNA, 21 bp, Homo sapiens
caggaataagactatttccta

SEQ ID NO: 14839 - DNA, 21 bp, Homo sapiens
ttggatctcttggttgtggaa

SEQ ID NO: 14840 - DNA, 21 bp, Homo sapiens
cccgccagactaactacataa

SEQ ID NO: 14841 - DNA, 21 bp, Homo sapiens
aagccagttctttgggctgat

SEQ ID NO: 14842 - DNA, 21 bp, Homo sapiens
ctgggtaattgtggccttgga

SEQ ID NO: 14843 - DNA, 21 bp, Homo sapiens
taggattgagatacacagttt

SEQ ID NO: 14844 - DNA, 21 bp, Homo sapiens
caggcaccttatatcctcaaa

SEQ ID NO: 14845 - DNA, 21 bp, Homo sapiens
caacatgatgatgattattat

SEQ ID NO: 14846 - DNA, 21 bp, Homo sapiens
ctgagtgtcatcaacctccta

SEQ ID NO: 14847 - DNA, 21 bp, Homo sapiens
gcggacggagtacgccatcaa

SEQ ID NO: 14848 - DNA, 21 bp, Homo sapiens
aggagccgagatggaaattta

SEQ ID NO: 14849 - DNA, 21 bp, Homo sapiens
cactggaacatcataagggaa

SEQ ID NO: 14850 - DNA, 21 bp, Homo sapiens
cagcaggatcctgaagcccat

SEQ ID NO: 14851 - DNA, 21 bp, Homo sapiens
cacctagatgggcctctctaa

SEQ ID NO: 14852 - DNA, 21 bp, Homo sapiens
cacaatgaaatgagaagataa

SEQ ID NO: 14853 - DNA, 21 bp, Homo sapiens
gccttagtttaccacttctta

SEQ ID NO: 14854 - DNA, 21 bp, Homo sapiens
ctgggctgttctggacttcaa

SEQ ID NO: 14855 - DNA, 21 bp, Homo sapiens
caggatcacactggccaacat

SEQ ID NO: 14856 - DNA, 21 bp, Homo sapiens
cccaataaacaatcatttcaa

SEQ ID NO: 14857 - DNA, 21 bp, Homo sapiens
tccctgattaatggaggctta

SEQ ID NO: 14858 - DNA, 21 bp, Homo sapiens
caggtctggaatgcaaagtca

SEQ ID NO: 14859 - DNA, 21 bp, Homo sapiens
caggcaaatagtgtcatcgat

SEQ ID NO: 14860 - DNA, 21 bp, Homo sapiens
acggcagaatatatggctgta

SEQ ID NO: 14861 - DNA, 21 bp, Homo sapiens
ctcatgtatattggaggcaaa

SEQ ID NO: 14862 - DNA, 21 bp, Homo sapiens
ctggcttagactagagtataa

SEQ ID NO: 14863 - DNA, 21 bp, Homo sapiens
atggctaaagaccttaaccaa

SEQ ID NO: 14864 - DNA, 21 bp, Homo sapiens
aaggcaagtttacatcacaaa

SEQ ID NO: 14865 - DNA, 21 bp, Homo sapiens
ccggatacagaaatcaagtaa

SEQ ID NO: 14866 - DNA, 21 bp, Homo sapiens
tacctatactttgatactgaa

SEQ ID NO: 14867 - DNA, 21 bp, Homo sapiens
tcggcatgtcatagagattta

SEQ ID NO: 14868 - DNA, 21 bp, Homo sapiens
cccagtaatcggcaaattaaa

SEQ ID NO: 14869 - DNA, 21 bp, Homo sapiens
aagccttatgtgtgcaatata

SEQ ID NO: 14870 - DNA, 21 bp, Homo sapiens
cagaaggtacatataacagaa

SEQ ID NO: 14871 - DNA, 21 bp, Homo sapiens
aacagtatacaccaaatgaaa

SEQ ID NO: 14872 - DNA, 21 bp, Homo sapiens
cagcttgggagaatacataaa

SEQ ID NO: 14873 - DNA, 21 bp, Homo sapiens
atgggaaatcttatgcatgta

SEQ ID NO: 14874 - DNA, 21 bp, Homo sapiens
cacctgtgaagccaactataa

SEQ ID NO: 14875 - DNA, 21 bp, Homo sapiens
cagaaacattctagtacaata

SEQ ID NO: 14876 - DNA, 21 bp, Homo sapiens
ctgctttgatgtatagttaaa

SEQ ID NO: 14877 - DNA, 21 bp, Homo sapiens
ctccttgtctttataggcaat

SEQ ID NO: 14878 - DNA, 21 bp, Homo sapiens
tgcaattagttctattactta

SEQ ID NO: 14879 - DNA, 21 bp, Homo sapiens
ctcctacattgtcatcctgta

SEQ ID NO: 14880 - DNA, 21 bp, Homo sapiens
ctcagtgaccttggaatctat

SEQ ID NO: 14881 - DNA, 21 bp, Homo sapiens
cccgctggatgtactggtgga

SEQ ID NO: 14882 - DNA, 21 bp, Homo sapiens
tgggaccaagtttgccattca

SEQ ID NO: 14883 - DNA, 21 bp, Homo sapiens
ccggtgctcagaaatcccaaa

SEQ ID NO: 14884 - DNA, 21 bp, Homo sapiens
caggattacgtcatccagttt

SEQ ID NO: 14885 - DNA, 21 bp, Homo sapiens
aagcaagtatttataagaata

SEQ ID NO: 14886 - DNA, 21 bp, Homo sapiens
aacgagaatatttaagtttaa

SEQ ID NO: 14887 - DNA, 21 bp, Homo sapiens
tccctggatatgaccagaata

SEQ ID NO: 14888 - DNA, 21 bp, Homo sapiens
aacagtgttagggcaacttaa

SEQ ID NO: 14889 - DNA, 21 bp, Homo sapiens
taccatcttgtacgagcaata

SEQ ID NO: 14890 - DNA, 21 bp, Homo sapiens
cagccaatgggtgtaatttca

SEQ ID NO: 14891 - DNA, 21 bp, Homo sapiens
acctcttgcctttcatttcaa

SEQ ID NO: 14892 - DNA, 21 bp, Homo sapiens
caggcaaattccacaaacatt

SEQ ID NO: 14893 - DNA, 21 bp, Homo sapiens
caggagaagaagcttccagaa

SEQ ID NO: 14894 - DNA, 21 bp, Homo sapiens
ttggaggaagtggaagcctaa

SEQ ID NO: 14895 - DNA, 21 bp, Homo sapiens
cagcgtgatcctgtttgtcat

SEQ ID NO: 14896 - DNA, 21 bp, Homo sapiens
cacgtgaaatcagtctatata

SEQ ID NO: 14897 - DNA, 21 bp, Homo sapiens
tcgacctacagttgagataaa

SEQ ID NO: 14898 - DNA, 21 bp, Homo sapiens
aggaatcaacagagaatgaaa

SEQ ID NO: 14899 - DNA, 21 bp, Homo sapiens
aagaaagaactcggcagtgaa

SEQ ID NO: 14900 - DNA, 21 bp, Homo sapiens
cacggagagaccaaagatgaa

SEQ ID NO: 14901 - DNA, 21 bp, Homo sapiens
ccggatcacttccatcgctga

SEQ ID NO: 14902 - DNA, 21 bp, Homo sapiens
caccttgtgtcaagaaggcaa

SEQ ID NO: 14903 - DNA, 21 bp, Homo sapiens
agggctagcgactgacagaaa

SEQ ID NO: 14904 - DNA, 21 bp, Homo sapiens
aacggcgaggagtacatccaa

SEQ ID NO: 14905 - DNA, 21 bp, Homo sapiens
cagactatcctgtgtccctaa

SEQ ID NO: 14906 - DNA, 21 bp, Homo sapiens
cccgagaagttgtgacatcta

SEQ ID NO: 14907 - DNA, 21 bp, Homo sapiens
caggaacgccttctccatcta

SEQ ID NO: 14908 - DNA, 21 bp, Homo sapiens
ctgattctgcttggtgtcaaa

SEQ ID NO: 14909 - DNA, 21 bp, Homo sapiens
cgccttatatattccctgtta

SEQ ID NO: 14910 - DNA, 21 bp, Homo sapiens
cacgtggacagggaagtctta

SEQ ID NO: 14911 - DNA, 21 bp, Homo sapiens
aacatacttgtctgagatcaa

SEQ ID NO: 14912 - DNA, 21 bp, Homo sapiens
atggctatacatgcagctgaa

SEQ ID NO: 14913 - DNA, 21 bp, Homo sapiens
aagccgagtgttgaatcagta

SEQ ID NO: 14914 - DNA, 21 bp, Homo sapiens
tgggatgtatttgcacctgaa

SEQ ID NO: 14915 - DNA, 21 bp, Homo sapiens
caccaatagactttcatatat

SEQ ID NO: 14916 - DNA, 21 bp, Homo sapiens
atagatgtgatcattcctata

SEQ ID NO: 14917 - DNA, 21 bp, Homo sapiens
caaggaaataacttctaccaa

SEQ ID NO: 14918 - DNA, 21 bp, Homo sapiens
ttgcaactctctggtcagtaa

SEQ ID NO: 14919 - DNA, 21 bp, Homo sapiens
aggcatttacagagatcatta

SEQ ID NO: 14920 - DNA, 21 bp, Homo sapiens
aagagagacggtaacaaggaa

SEQ ID NO: 14921 - DNA, 21 bp, Homo sapiens
aagtatttgagtaatagagta

SEQ ID NO: 14922 - DNA, 21 bp, Homo sapiens
ctggtgatgttggaacattaa

SEQ ID NO: 14923 - DNA, 21 bp, Homo sapiens
ccgggcctgtatccagcctca

SEQ ID NO: 14924 - DNA, 21 bp, Homo sapiens
agggccaaagatgccttagaa

SEQ ID NO: 14925 - DNA, 21 bp, Homo sapiens
ctgccacatagcccagttcaa

SEQ ID NO: 14926 - DNA, 21 bp, Homo sapiens
caggcctttaagagggccaaa

SEQ ID NO: 14927 - DNA, 21 bp, Homo sapiens
acggagtacgagtccatccta

SEQ ID NO: 14928 - DNA, 21 bp, Homo sapiens
ctgcagggagacggccctcta

SEQ ID NO: 14929 - DNA, 21 bp, Homo sapiens
cagcagagaattaaagagtta

SEQ ID NO: 14930 - DNA, 21 bp, Homo sapiens
cagcagaattcaagtatttaa

SEQ ID NO: 14931 - DNA, 21 bp, Homo sapiens
ccctatgaatggaatatacaa

SEQ ID NO: 14932 - DNA, 21 bp, Homo sapiens
cagatttacattggtttctaa

SEQ ID NO: 14933 - DNA, 21 bp, Homo sapiens
aaacaagactatcttattcaa

SEQ ID NO: 14934 - DNA, 21 bp, Homo sapiens
cagcatgtttgtagcctgcta

SEQ ID NO: 14935 - DNA, 21 bp, Homo sapiens
caccctgcgagtcttccagaa

SEQ ID NO: 14936 - DNA, 21 bp, Homo sapiens
atagttattgattctgacaaa

SEQ ID NO: 14937 - DNA, 21 bp, Homo sapiens
tcccgccagggttaaacatta

SEQ ID NO: 14938 - DNA, 21 bp, Homo sapiens
cacgcccttagacgtgatcaa

SEQ ID NO: 14939 - DNA, 21 bp, Homo sapiens
cccggctgccttcacctctta

SEQ ID NO: 14940 - DNA, 21 bp, Homo sapiens
gcgcttcttcagagtcattaa

SEQ ID NO: 14941 - DNA, 21 bp, Homo sapiens
cccgattgtatgctccatcta

SEQ ID NO: 14942 - DNA, 21 bp, Homo sapiens
cagatgatcaataaatactaa

SEQ ID NO: 14943 - DNA, 21 bp, Homo sapiens
cggcaccatctaacacattaa

SEQ ID NO: 14944 - DNA, 21 bp, Homo sapiens
caggcagtcagcacaaattta

SEQ ID NO: 14945 - DNA, 21 bp, Homo sapiens
cacctacttcttatcaaagaa

SEQ ID NO: 14946 - DNA, 21 bp, Homo sapiens
caacatgaacatgaacatgaa

SEQ ID NO: 14947 - DNA, 21 bp, Homo sapiens
cccttcctctttgatctttaa

SEQ ID NO: 14948 - DNA, 21 bp, Homo sapiens
ctggatgtgggtaaatcccaa

SEQ ID NO: 14949 - DNA, 21 bp, Homo sapiens
ctcctttacaaccatacttta

SEQ ID NO: 14950 - DNA, 21 bp, Homo sapiens
ctgcatttgatagcaatgtaa

SEQ ID NO: 14951 - DNA, 21 bp, Homo sapiens
aagaaatgttataaagtagaa

SEQ ID NO: 14952 - DNA, 21 bp, Homo sapiens
ttggaacggatgaagcattta

SEQ ID NO: 14953 - DNA, 21 bp, Homo sapiens
ctgaatgactttgtttcagaa

SEQ ID NO: 14954 - DNA, 21 bp, Homo sapiens
cagggacattcacctacttaa

SEQ ID NO: 14955 - DNA, 21 bp, Homo sapiens
caggagcaagggtgtcattta

SEQ ID NO: 14956 - DNA, 21 bp, Homo sapiens
aaggcgctgtttcttaaccaa

SEQ ID NO: 14957 - DNA, 21 bp, Homo sapiens
acccattgctttattcaggta

SEQ ID NO: 14958 - DNA, 21 bp, Homo sapiens
cacagactatacaaccacaaa

SEQ ID NO: 14959 - DNA, 21 bp, Homo sapiens
cacattgtgttgaaagaagaa

SEQ ID NO: 14960 - DNA, 21 bp, Homo sapiens
atggatgaatttaaacagttt

SEQ ID NO: 14961 - DNA, 21 bp, Homo sapiens
cagatcacttgtcctcctcaa

SEQ ID NO: 14962 - DNA, 21 bp, Homo sapiens
aggctgtaaggtcatcgtata

SEQ ID NO: 14963 - DNA, 21 bp, Homo sapiens
aaggattaatgccaaactaaa

SEQ ID NO: 14964 - DNA, 21 bp, Homo sapiens
caggtattaatttacaaatta

SEQ ID NO: 14965 - DNA, 21 bp, Homo sapiens
atggctgatgctaataataat

SEQ ID NO: 14966 - DNA, 21 bp, Homo sapiens
cagggatagtttccagctcaa

SEQ ID NO: 14967 - DNA, 21 bp, Homo sapiens
atccatctgtttatttctata

SEQ ID NO: 14968 - DNA, 21 bp, Homo sapiens
ctgggcatgtttggttaacaa

SEQ ID NO: 14969 - DNA, 21 bp, Homo sapiens
caccgttgacttatcaggaaa

SEQ ID NO: 14970 - DNA, 21 bp, Homo sapiens
cacaataaatttatctacata

SEQ ID NO: 14971 - DNA, 21 bp, Homo sapiens
ttgaattgcattctaatgtta

SEQ ID NO: 14972 - DNA, 21 bp, Homo sapiens
caggccctgtttctacctcaa

SEQ ID NO: 14973 - DNA, 21 bp, Homo sapiens
ttgcattctaatgttattaaa

SEQ ID NO: 14974 - DNA, 21 bp, Homo sapiens
acgaatcagaatggcaatata

SEQ ID NO: 14975 - DNA, 21 bp, Homo sapiens
cacctctgtgtttgaactgga

SEQ ID NO: 14976 - DNA, 21 bp, Homo sapiens
caccatggcatatgaccgcta

SEQ ID NO: 14977 - DNA, 21 bp, Homo sapiens
ctcaaggaataaagaagtgaa

SEQ ID NO: 14978 - DNA, 21 bp, Homo sapiens
accatttacttggttacttta

SEQ ID NO: 14979 - DNA, 21 bp, Homo sapiens
caggcctttctcagactgtat

SEQ ID NO: 14980 - DNA, 21 bp, Homo sapiens
cagctttgtttgaatttatta

SEQ ID NO: 14981 - DNA, 21 bp, Homo sapiens
aaagctaggcatacagccaaa

SEQ ID NO: 14982 - DNA, 21 bp, Homo sapiens
taccagatggctgaagagtaa

SEQ ID NO: 14983 - DNA, 21 bp, Homo sapiens
tccggatgagatcgccatgta

SEQ ID NO: 14984 - DNA, 21 bp, Homo sapiens
caaggagggcctgaaagtcta

SEQ ID NO: 14985 - DNA, 21 bp, Homo sapiens
cagcatgcactactacctgaa

SEQ ID NO: 14986 - DNA, 21 bp, Homo sapiens
caagcacagattgacacgtaa

SEQ ID NO: 14987 - DNA, 21 bp, Homo sapiens
tggcaaaggtttggtgaaata

SEQ ID NO: 14988 - DNA, 21 bp, Homo sapiens
atcaggttgctcagcaatgaa

SEQ ID NO: 14989 - DNA, 21 bp, Homo sapiens
tacaatgttcaagatagagaa

SEQ ID NO: 14990 - DNA, 21 bp, Homo sapiens
ccggtactcataaaccttcta

SEQ ID NO: 14991 - DNA, 21 bp, Homo sapiens
caggcttaccgtggacgccta

SEQ ID NO: 14992 - DNA, 21 bp, Homo sapiens
aaggaaatccattacttcaaa

SEQ ID NO: 14993 - DNA, 21 bp, Homo sapiens
tccgttgtgagggatgccaaa

SEQ ID NO: 14994 - DNA, 21 bp, Homo sapiens
atccggtgacctcgaatccaa

SEQ ID NO: 14995 - DNA, 21 bp, Homo sapiens
cacacaaagctttctcttaaa

SEQ ID NO: 14996 - DNA, 21 bp, Homo sapiens
aaggtggatttggaagaacaa

SEQ ID NO: 14997 - DNA, 21 bp, Homo sapiens
cacctttgtcttacagtttat

SEQ ID NO: 14998 - DNA, 21 bp, Homo sapiens
ccaaataaatacataatacaa

SEQ ID NO: 14999 - DNA, 21 bp, Homo sapiens
ctcactggagttgaccatcaa

SEQ ID NO: 15000 - DNA, 21 bp, Homo sapiens
aagcaggaacttaatttagaa

SEQ ID NO: 15001 - DNA, 21 bp, Homo sapiens
ccgcaagatgctcacgcgaaa

SEQ ID NO: 15002 - DNA, 21 bp, Homo sapiens
ccggagggtatgggaagagaa

SEQ ID NO: 15003 - DNA, 21 bp, Homo sapiens
acgctgcacctgccacttaaa

SEQ ID NO: 15004 - DNA, 21 bp, Homo sapiens
caggatccagacggagccaaa

SEQ ID NO: 15005 - DNA, 21 bp, Homo sapiens
ttgggaactgttgtcaataaa

SEQ ID NO: 15006 - DNA, 21 bp, Homo sapiens
cacggtgaaggtcaggatcca

SEQ ID NO: 15007 - DNA, 21 bp, Homo sapiens
aaggatgtgactctcctagaa

SEQ ID NO: 15008 - DNA, 21 bp, Homo sapiens
cccaggcagatgaaagcttaa

SEQ ID NO: 15009 - DNA, 21 bp, Homo sapiens
taggaaatgaagaatctttaa

SEQ ID NO: 15010 - DNA, 21 bp, Homo sapiens
caacagtaaattggtaattaa

SEQ ID NO: 15011 - DNA, 21 bp, Homo sapiens
cccagggcaactgaaagtcaa

SEQ ID NO: 15012 - DNA, 21 bp, Homo sapiens
ctggcgggtttgagaaattaa

SEQ ID NO: 15013 - DNA, 21 bp, Homo sapiens
cactgtgtgaatatagtctga

SEQ ID NO: 15014 - DNA, 21 bp, Homo sapiens
tccctccaaagttctttgtaa

SEQ ID NO: 15015 - DNA, 21 bp, Homo sapiens
atgtgcaccactcgtgtcatt

SEQ ID NO: 15016 - DNA, 21 bp, Homo sapiens
caccactcgtgtcattattat

SEQ ID NO: 15017 - DNA, 21 bp, Homo sapiens
taagctggcttaagagatcaa

SEQ ID NO: 15018 - DNA, 21 bp, Homo sapiens
aaagatgctaacggtagcata

SEQ ID NO: 15019 - DNA, 21 bp, Homo sapiens
cccacagggtttgaactgtaa

SEQ ID NO: 15020 - DNA, 21 bp, Homo sapiens
cccagtcaagttgacctgtaa

SEQ ID NO: 15021 - DNA, 21 bp, Homo sapiens
aagggtccaattgactagaaa

SEQ ID NO: 15022 - DNA, 21 bp, Homo sapiens
taggatgaatatggactttga

SEQ ID NO: 15023 - DNA, 21 bp, Homo sapiens
cccactgaaagtggccaagaa

SEQ ID NO: 15024 - DNA, 21 bp, Homo sapiens
ccgtatgatggacatagttca

SEQ ID NO: 15025 - DNA, 21 bp, Homo sapiens
aagagtgggcatgaagctcaa

SEQ ID NO: 15026 - DNA, 21 bp, Homo sapiens
caggttgtgacatggagcaaa

SEQ ID NO: 15027 - DNA, 21 bp, Homo sapiens
cccatgctagttgcagagaaa

SEQ ID NO: 15028 - DNA, 21 bp, Homo sapiens
caggacattatctcaccataa

SEQ ID NO: 15029 - DNA, 21 bp, Homo sapiens
accgcatctctgtgaaataaa

SEQ ID NO: 15030 - DNA, 21 bp, Homo sapiens
ctcctttcccttatacattaa

SEQ ID NO: 15031 - DNA, 21 bp, Homo sapiens
ccgcccgttattgctgctcaa

SEQ ID NO: 15032 - DNA, 21 bp, Homo sapiens
cagcgacaccatgatgattta

SEQ ID NO: 15033 - DNA, 21 bp, Homo sapiens
taagaaatcagtaaatattaa

SEQ ID NO: 15034 - DNA, 21 bp, Homo sapiens
caggaagggaatacaaaggta

SEQ ID NO: 15035 - DNA, 21 bp, Homo sapiens
cagaagaattggagagattta

SEQ ID NO: 15036 - DNA, 21 bp, Homo sapiens
caggttgagaggcatatacaa

SEQ ID NO: 15037 - DNA, 21 bp, Homo sapiens
atccaatatatcaatgatgaa

SEQ ID NO: 15038 - DNA, 21 bp, Homo sapiens
atgcatgtgaatatacaatta

SEQ ID NO: 15039 - DNA, 21 bp, Homo sapiens
ccgccctggcttcctcaccaa

SEQ ID NO: 15040 - DNA, 21 bp, Homo sapiens
cccgcaggagatcctgatcaa

SEQ ID NO: 15041 - DNA, 21 bp, Homo sapiens
ccagttggtcttcatctccaa

SEQ ID NO: 15042 - DNA, 21 bp, Homo sapiens
ctgggagagtccgaacacaaa

SEQ ID NO: 15043 - DNA, 21 bp, Homo sapiens
ccagtcgggtgtgaccatcaa

SEQ ID NO: 15044 - DNA, 21 bp, Homo sapiens
caggaagctcagcgagttgta

SEQ ID NO: 15045 - DNA, 21 bp, Homo sapiens
ccagaagctggtgatcatcaa

SEQ ID NO: 15046 - DNA, 21 bp, Homo sapiens
acggacagttgggcaccaata

SEQ ID NO: 15047 - DNA, 21 bp, Homo sapiens
caggagtcataatgaacataa

SEQ ID NO: 15048 - DNA, 21 bp, Homo sapiens
cagactgaggaagaaaggaaa

SEQ ID NO: 15049 - DNA, 21 bp, Homo sapiens
cacccttactgcttcccataa

SEQ ID NO: 15050 - DNA, 21 bp, Homo sapiens
ctggacggcactgaactgcaa

SEQ ID NO: 15051 - DNA, 21 bp, Homo sapiens
caactttaaagtcatgatcta

SEQ ID NO: 15052 - DNA, 21 bp, Homo sapiens
gaggaaagattgaatcctaaa

SEQ ID NO: 15053 - DNA, 21 bp, Homo sapiens
cacgatggactgagccagctt

SEQ ID NO: 15054 - DNA, 21 bp, Homo sapiens
cgggaccggatacattattaa

SEQ ID NO: 15055 - DNA, 21 bp, Homo sapiens
ttggccaaggttagcgattat

SEQ ID NO: 15056 - DNA, 21 bp, Homo sapiens
tgggtctaggattctcagtaa

SEQ ID NO: 15057 - DNA, 21 bp, Homo sapiens
atgggtgagagttgaaatgaa

SEQ ID NO: 15058 - DNA, 21 bp, Homo sapiens
aagagagagattggtgttaat

SEQ ID NO: 15059 - DNA, 21 bp, Homo sapiens
tccatctggactagcaataaa

SEQ ID NO: 15060 - DNA, 21 bp, Homo sapiens
aaaggtattgaatgaattgaa

SEQ ID NO: 15061 - DNA, 21 bp, Homo sapiens
agggagggagatggactcgaa

SEQ ID NO: 15062 - DNA, 21 bp, Homo sapiens
aagggctatggatctaaataa

SEQ ID NO: 15063 - DNA, 21 bp, Homo sapiens
cacacaagagttccctttcaa

SEQ ID NO: 15064 - DNA, 21 bp, Homo sapiens
ccctgcgggaattctattaaa

SEQ ID NO: 15065 - DNA, 21 bp, Homo sapiens
aggcctgaccctggtaccgaa

SEQ ID NO: 15066 - DNA, 21 bp, Homo sapiens
aacaggtgctctcatcgttaa

SEQ ID NO: 15067 - DNA, 21 bp, Homo sapiens
gtgtcttgcagcagacttaaa

SEQ ID NO: 15068 - DNA, 21 bp, Homo sapiens
aagtctgccagtgcctattaa

SEQ ID NO: 15069 - DNA, 21 bp, Homo sapiens
aagagaatgctggctattaaa

SEQ ID NO: 15070 - DNA, 21 bp, Homo sapiens
cccaccagactttctgtaaga

SEQ ID NO: 15071 - DNA, 21 bp, Homo sapiens
cccaggagtccaattatgaaa

SEQ ID NO: 15072 - DNA, 21 bp, Homo sapiens
acgcattagcttgagcgtgaa

SEQ ID NO: 15073 - DNA, 21 bp, Homo sapiens
caggtttgtggtgggagagat

SEQ ID NO: 15074 - DNA, 21 bp, Homo sapiens
cagcagctcttcacagtctca

SEQ ID NO: 15075 - DNA, 21 bp, Homo sapiens
acccgtaggtaccgtccttaa

SEQ ID NO: 15076 - DNA, 21 bp, Homo sapiens
aacgcttacattcaattcttt

SEQ ID NO: 15077 - DNA, 21 bp, Homo sapiens
acgcttacattcaattcttta

SEQ ID NO: 15078 - DNA, 21 bp, Homo sapiens
tacgatggtctcaacaccttt

SEQ ID NO: 15079 - DNA, 21 bp, Homo sapiens
aaatggcacatttgcattaaa

SEQ ID NO: 15080 - DNA, 21 bp, Homo sapiens
gtggcaaattctaccaagcaa

SEQ ID NO: 15081 - DNA, 21 bp, Homo sapiens
cagctagactttgtgaatgat

SEQ ID NO: 15082 - DNA, 21 bp, Homo sapiens
aacaactatgcaaacattaaa

SEQ ID NO: 15083 - DNA, 21 bp, Homo sapiens
caggatttcattcaaacatgt

SEQ ID NO: 15084 - DNA, 21 bp, Homo sapiens
cagagacatcctctactgaaa

SEQ ID NO: 15085 - DNA, 21 bp, Homo sapiens
cacaccaaaggtggtacccaa

SEQ ID NO: 15086 - DNA, 21 bp, Homo sapiens
cccttggaacctaacagataa

SEQ ID NO: 15087 - DNA, 21 bp, Homo sapiens
cgccacggccctgaagatgaa

SEQ ID NO: 15088 - DNA, 21 bp, Homo sapiens
ctcgactgtctggacctgaaa

SEQ ID NO: 15089 - DNA, 21 bp, Homo sapiens
agccgtggacatagcttccaa

SEQ ID NO: 15090 - DNA, 21 bp, Homo sapiens
cagggtatacatgcaataaat

SEQ ID NO: 15091 - DNA, 21 bp, Homo sapiens
ccgggatgtggcagccctgaa

SEQ ID NO: 15092 - DNA, 21 bp, Homo sapiens
ctccctgtaagtctatttaaa

SEQ ID NO: 15093 - DNA, 21 bp, Homo sapiens
ccgaatttgtgccaataagta

SEQ ID NO: 15094 - DNA, 21 bp, Homo sapiens
accaagttcaatgctgatgaa

SEQ ID NO: 15095 - DNA, 21 bp, Homo sapiens
ccgcaccaagctgcagaacaa

SEQ ID NO: 15096 - DNA, 21 bp, Homo sapiens
cccgttgttaccggtattgta

SEQ ID NO: 15097 - DNA, 21 bp, Homo sapiens
caggaggattaataggtggaa

SEQ ID NO: 15098 - DNA, 21 bp, Homo sapiens
tcccatgagtatgtagccata

SEQ ID NO: 15099 - DNA, 21 bp, Homo sapiens
aagaattacttctgtggaata

SEQ ID NO: 15100 - DNA, 21 bp, Homo sapiens
ctgggtcagaagattcctgaa

SEQ ID NO: 15101 - DNA, 21 bp, Homo sapiens
atgcatgacaacaaccttgaa

SEQ ID NO: 15102 - DNA, 21 bp, Homo sapiens
aatggtgaacatgtcacacaa

SEQ ID NO: 15103 - DNA, 21 bp, Homo sapiens
tgggatttggtgagaatctta

SEQ ID NO: 15104 - DNA, 21 bp, Homo sapiens
aagggcaaacttgaaacataa

SEQ ID NO: 15105 - DNA, 21 bp, Homo sapiens
aagaagtagagtggctcataa

SEQ ID NO: 15106 - DNA, 21 bp, Homo sapiens
cagactcggattgctaacgaa

SEQ ID NO: 15107 - DNA, 21 bp, Homo sapiens
ctggctttacagcagaaacaa

SEQ ID NO: 15108 - DNA, 21 bp, Homo sapiens
ctcagctttcttatctttata

SEQ ID NO: 15109 - DNA, 21 bp, Homo sapiens
gaggaccttgtgcatgaataa

SEQ ID NO: 15110 - DNA, 21 bp, Homo sapiens
tggaatgaaatgaattctcta

SEQ ID NO: 15111 - DNA, 21 bp, Homo sapiens
cagctgaaatggcacattcta

SEQ ID NO: 15112 - DNA, 21 bp, Homo sapiens
cagggctgtcatcagcatcaa

SEQ ID NO: 15113 - DNA, 21 bp, Homo sapiens
gcggcagttgtgataaataaa

SEQ ID NO: 15114 - DNA, 21 bp, Homo sapiens
aagcatttaaatgaaattgat

SEQ ID NO: 15115 - DNA, 21 bp, Homo sapiens
ctggagagaagtggactccat

SEQ ID NO: 15116 - DNA, 21 bp, Homo sapiens
cagcttagggaaagagagcta

SEQ ID NO: 15117 - DNA, 21 bp, Homo sapiens
cagggtcccattcggcctctt

SEQ ID NO: 15118 - DNA, 21 bp, Homo sapiens
ttccggttaattgttctggta

SEQ ID NO: 15119 - DNA, 21 bp, Homo sapiens
tacactgaactttcacataaa

SEQ ID NO: 15120 - DNA, 21 bp, Homo sapiens
aggattgttgttaataatata

SEQ ID NO: 15121 - DNA, 21 bp, Homo sapiens
atgccacatgatgaatacata

SEQ ID NO: 15122 - DNA, 21 bp, Homo sapiens
caggtttcagatcccaagcta

SEQ ID NO: 15123 - DNA, 21 bp, Homo sapiens
ccggagggtcatggagaagga

SEQ ID NO: 15124 - DNA, 21 bp, Homo sapiens
cacaggatcttcatcatggaa

SEQ ID NO: 15125 - DNA, 21 bp, Homo sapiens
ctgcctgaacctcgactccaa

SEQ ID NO: 15126 - DNA, 21 bp, Homo sapiens
aaggagcaactggaccaggaa

SEQ ID NO: 15127 - DNA, 21 bp, Homo sapiens
tggaggtttcttgaagaccta

SEQ ID NO: 15128 - DNA, 21 bp, Homo sapiens
aagacctagaacatagaagaa

SEQ ID NO: 15129 - DNA, 21 bp, Homo sapiens
cagagaagaatgtgcagcaaa

SEQ ID NO: 15130 - DNA, 21 bp, Homo sapiens
atgaagatacgtgaaattcaa

SEQ ID NO: 15131 - DNA, 21 bp, Homo sapiens
tacgatatgctacagcaccaa

SEQ ID NO: 15132 - DNA, 21 bp, Homo sapiens
tcggctcttcagaatgtggta

SEQ ID NO: 15133 - DNA, 21 bp, Homo sapiens
aagggaatgcccagctattta

SEQ ID NO: 15134 - DNA, 21 bp, Homo sapiens
ccactgtttgttaggccttaa

SEQ ID NO: 15135 - DNA, 21 bp, Homo sapiens
cactgtttatgtactcatgta

SEQ ID NO: 15136 - DNA, 21 bp, Homo sapiens
cacgtgaattacacctttgaa

SEQ ID NO: 15137 - DNA, 21 bp, Homo sapiens
aagggttatttccgagctgaa

SEQ ID NO: 15138 - DNA, 21 bp, Homo sapiens
caggtatgtaatgtaatggaa

SEQ ID NO: 15139 - DNA, 21 bp, Homo sapiens
ctcgcagaagttatggagaaa

SEQ ID NO: 15140 - DNA, 21 bp, Homo sapiens
caggaagtatttattgtgaaa

SEQ ID NO: 15141 - DNA, 21 bp, Homo sapiens
aagggaggagatagccaggaa

SEQ ID NO: 15142 - DNA, 21 bp, Homo sapiens
cagctaaacatttctaaagaa

SEQ ID NO: 15143 - DNA, 21 bp, Homo sapiens
caggctgaactgtcactttaa

SEQ ID NO: 15144 - DNA, 21 bp, Homo sapiens
cagcataaactctatggttaa

SEQ ID NO: 15145 - DNA, 21 bp, Homo sapiens
tgtgggcagctccctgaacaa

SEQ ID NO: 15146 - DNA, 21 bp, Homo sapiens
ctgggctgttccggacttcaa

SEQ ID NO: 15147 - DNA, 21 bp, Homo sapiens
tgccatctaatctaacttcaa

SEQ ID NO: 15148 - DNA, 21 bp, Homo sapiens
cacggaatcaaagagaactaa

SEQ ID NO: 15149 - DNA, 21 bp, Homo sapiens
caccaacaaactattattaga

SEQ ID NO: 15150 - DNA, 21 bp, Homo sapiens
aagcagaatcacagtccataa

SEQ ID NO: 15151 - DNA, 21 bp, Homo sapiens
acgcatcaatttaggatacaa

SEQ ID NO: 15152 - DNA, 21 bp, Homo sapiens
caggcgtatatcactgtataa

SEQ ID NO: 15153 - DNA, 21 bp, Homo sapiens
cacaaggaccaaacatatgaa

SEQ ID NO: 15154 - DNA, 21 bp, Homo sapiens
cagatgggatctcaaagccaa

SEQ ID NO: 15155 - DNA, 21 bp, Homo sapiens
aagcctcatcagtttaattaa

SEQ ID NO: 15156 - DNA, 21 bp, Homo sapiens
aagtttgttcctaaacataaa

SEQ ID NO: 15157 - DNA, 21 bp, Homo sapiens
ttgagtgatactaatcatgta

SEQ ID NO: 15158 - DNA, 21 bp, Homo sapiens
caagtgaagaccaatattcaa

SEQ ID NO: 15159 - DNA, 21 bp, Homo sapiens
aacaatgggataagcatttaa

SEQ ID NO: 15160 - DNA, 21 bp, Homo sapiens
aaggatgacttccaaatttat

SEQ ID NO: 15161 - DNA, 21 bp, Homo sapiens
cagctgctactgttgcttcta

SEQ ID NO: 15162 - DNA, 21 bp, Homo sapiens
aagcagaaataccagtggtaa

SEQ ID NO: 15163 - DNA, 21 bp, Homo sapiens
cagctgcttcagactaccaaa

SEQ ID NO: 15164 - DNA, 21 bp, Homo sapiens
atggatgaggatgaattggaa

SEQ ID NO: 15165 - DNA, 21 bp, Homo sapiens
tggcagctactgcaaggttaa

SEQ ID NO: 15166 - DNA, 21 bp, Homo sapiens
gacattcttaattacaggtaa

SEQ ID NO: 15167 - DNA, 21 bp, Homo sapiens
aagtattagaatagaaccaaa

SEQ ID NO: 15168 - DNA, 21 bp, Homo sapiens
ctggcaattcctagttaataa

SEQ ID NO: 15169 - DNA, 21 bp, Homo sapiens
ctgcctggatctataaatgca

SEQ ID NO: 15170 - DNA, 21 bp, Homo sapiens
ctgagtgagcaccgccacaaa

SEQ ID NO: 15171 - DNA, 21 bp, Homo sapiens
aaggaaggtattgcagctcga

SEQ ID NO: 15172 - DNA, 21 bp, Homo sapiens
gcggtagaagaagaagctcaa

SEQ ID NO: 15173 - DNA, 21 bp, Homo sapiens
ctggatcatatggtaagtata

SEQ ID NO: 15174 - DNA, 21 bp, Homo sapiens
aagcaaggaattgataactaa

SEQ ID NO: 15175 - DNA, 21 bp, Homo sapiens
cagggatttcaacctagcaaa

SEQ ID NO: 15176 - DNA, 21 bp, Homo sapiens
aagagttcaactcttaataaa

SEQ ID NO: 15177 - DNA, 21 bp, Homo sapiens
caggaactccttcatagatga

SEQ ID NO: 15178 - DNA, 21 bp, Homo sapiens
cccagccaagtcagcatataa

SEQ ID NO: 15179 - DNA, 21 bp, Homo sapiens
atgagagtgaattctgaagaa

SEQ ID NO: 15180 - DNA, 21 bp, Homo sapiens
ctggttgagcactctatacat

SEQ ID NO: 15181 - DNA, 21 bp, Homo sapiens
ctgcacttgattacaatgaaa

SEQ ID NO: 15182 - DNA, 21 bp, Homo sapiens
ctgcagcatcttactacataa

SEQ ID NO: 15183 - DNA, 21 bp, Homo sapiens
ctgcgcttgctgcaagcttca

SEQ ID NO: 15184 - DNA, 21 bp, Homo sapiens
catgttatgtatgttgtcgaa

SEQ ID NO: 15185 - DNA, 21 bp, Homo sapiens
attgattgaattaatgtttaa

SEQ ID NO: 15186 - DNA, 21 bp, Homo sapiens
cagactatatttcatcagcaa

SEQ ID NO: 15187 - DNA, 21 bp, Homo sapiens
cacaatgacatctaagaatta

SEQ ID NO: 15188 - DNA, 21 bp, Homo sapiens
accgattaatctagagataaa

SEQ ID NO: 15189 - DNA, 21 bp, Homo sapiens
aaggtattggtgcctatgaaa

SEQ ID NO: 15190 - DNA, 21 bp, Homo sapiens
ctcctgctatctttaaatcaa

SEQ ID NO: 15191 - DNA, 21 bp, Homo sapiens
atctatcatattagaaatcaa

SEQ ID NO: 15192 - DNA, 21 bp, Homo sapiens
aaggagaagaatgactattta

SEQ ID NO: 15193 - DNA, 21 bp, Homo sapiens
ctgcatcatctttgagtacta

SEQ ID NO: 15194 - DNA, 21 bp, Homo sapiens
cccggatgatccgaaagacaa

SEQ ID NO: 15195 - DNA, 21 bp, Homo sapiens
tacagtctttgtgaaatgaaa

SEQ ID NO: 15196 - DNA, 21 bp, Homo sapiens
gtgaatatgtgaaacagtaaa

SEQ ID NO: 15197 - DNA, 21 bp, Homo sapiens
ctcctaataagtgttccataa

SEQ ID NO: 15198 - DNA, 21 bp, Homo sapiens
ccctggtaacatcatcctcaa

SEQ ID NO: 15199 - DNA, 21 bp, Homo sapiens
cagctctggcacagtcaagaa

SEQ ID NO: 15200 - DNA, 21 bp, Homo sapiens
cagcctcacctttgctctcaa

SEQ ID NO: 15201 - DNA, 21 bp, Homo sapiens
aagaatggactcttctattaa

SEQ ID NO: 15202 - DNA, 21 bp, Homo sapiens
caagctgtttataaactataa

SEQ ID NO: 15203 - DNA, 21 bp, Homo sapiens
aaccatactgttagtctatta

SEQ ID NO: 15204 - DNA, 21 bp, Homo sapiens
ctggctttccatgactaccaa

SEQ ID NO: 15205 - DNA, 21 bp, Homo sapiens
caccgatctaatgacattcaa

SEQ ID NO: 15206 - DNA, 21 bp, Homo sapiens
caagtagttattgaacttcta

SEQ ID NO: 15207 - DNA, 21 bp, Homo sapiens
aagcattctgtttctggagaa

SEQ ID NO: 15208 - DNA, 21 bp, Homo sapiens
aagcaattcactcataagtaa

SEQ ID NO: 15209 - DNA, 21 bp, Homo sapiens
accggaggagagactcatcta

SEQ ID NO: 15210 - DNA, 21 bp, Homo sapiens
cagggtcagtttactaagtta

SEQ ID NO: 15211 - DNA, 21 bp, Homo sapiens
cgggaccagcttccttagcaa

SEQ ID NO: 15212 - DNA, 21 bp, Homo sapiens
caaggagatgaaggagttcta

SEQ ID NO: 15213 - DNA, 21 bp, Homo sapiens
ctcaatgaatatagaagggaa

SEQ ID NO: 15214 - DNA, 21 bp, Homo sapiens
cagccaggattcaaactataa

SEQ ID NO: 15215 - DNA, 21 bp, Homo sapiens
cacagtggtgcccaagaggaa

SEQ ID NO: 15216 - DNA, 21 bp, Homo sapiens
ctcctcaagaaagaagatgaa

SEQ ID NO: 15217 - DNA, 21 bp, Homo sapiens
atcattctcatgagtcgcaaa

SEQ ID NO: 15218 - DNA, 21 bp, Homo sapiens
ctgtatatctggaatgtttaa

SEQ ID NO: 15219 - DNA, 21 bp, Homo sapiens
cagcagaatccttatttataa

SEQ ID NO: 15220 - DNA, 21 bp, Homo sapiens
aaccgcataattattcattaa

SEQ ID NO: 15221 - DNA, 21 bp, Homo sapiens
taggcagatctccgtgaagtt

SEQ ID NO: 15222 - DNA, 21 bp, Homo sapiens
ttgtaccaacgcaatgaacaa

SEQ ID NO: 15223 - DNA, 21 bp, Homo sapiens
tacaaagaccagtgaattata

SEQ ID NO: 15224 - DNA, 21 bp, Homo sapiens
ttgaattctattagtatgtaa

SEQ ID NO: 15225 - DNA, 21 bp, Homo sapiens
ctgggccaatgttgtatcctt

SEQ ID NO: 15226 - DNA, 21 bp, Homo sapiens
gagggaggaggcaaccttgaa

SEQ ID NO: 15227 - DNA, 21 bp, Homo sapiens
ttgctacaacatccagcctaa

SEQ ID NO: 15228 - DNA, 21 bp, Homo sapiens
cagtctaggttctacatctta

SEQ ID NO: 15229 - DNA, 21 bp, Homo sapiens
cagcattaccctcatcatcat

SEQ ID NO: 15230 - DNA, 21 bp, Homo sapiens
cagggagaggacagaaatgaa

SEQ ID NO: 15231 - DNA, 21 bp, Homo sapiens
ttcctttagatgtctcataaa

SEQ ID NO: 15232 - DNA, 21 bp, Homo sapiens
taggcttccaacaccaaataa

SEQ ID NO: 15233 - DNA, 21 bp, Homo sapiens
acgagtggttctattcaaata

SEQ ID NO: 15234 - DNA, 21 bp, Homo sapiens
ccagtagaatttcttatccaa

SEQ ID NO: 15235 - DNA, 21 bp, Homo sapiens
cccatttagaagaacatgtaa

SEQ ID NO: 15236 - DNA, 21 bp, Homo sapiens
caagaagaaactgcaaataaa

SEQ ID NO: 15237 - DNA, 21 bp, Homo sapiens
tagcacaaagacaaatgatta

SEQ ID NO: 15238 - DNA, 21 bp, Homo sapiens
ccgatttatgtggattgtctt

SEQ ID NO: 15239 - DNA, 21 bp, Homo sapiens
ctggcaagtggaacagcataa

SEQ ID NO: 15240 - DNA, 21 bp, Homo sapiens
ctcagtgatattggatgcaaa

SEQ ID NO: 15241 - DNA, 21 bp, Homo sapiens
caggagagcctcgtccagaaa

SEQ ID NO: 15242 - DNA, 21 bp, Homo sapiens
ctggaggagtctgtcaaggaa

SEQ ID NO: 15243 - DNA, 21 bp, Homo sapiens
cagcactttcagcttcaaata

SEQ ID NO: 15244 - DNA, 21 bp, Homo sapiens
cacgatttatacattgcataa

SEQ ID NO: 15245 - DNA, 21 bp, Homo sapiens
tccgttgtccatcacaaacaa

SEQ ID NO: 15246 - DNA, 21 bp, Homo sapiens
cacgctggacatccagagaca

SEQ ID NO: 15247 - DNA, 21 bp, Homo sapiens
tgccattacattagcatgtat

SEQ ID NO: 15248 - DNA, 21 bp, Homo sapiens
gagggtaatgttacttcacaa

SEQ ID NO: 15249 - DNA, 21 bp, Homo sapiens
tactatggtggtctgcgttat

SEQ ID NO: 15250 - DNA, 21 bp, Homo sapiens
gtgctactacagcaactacta

SEQ ID NO: 15251 - DNA, 21 bp, Homo sapiens
ctgcagcttcctgcagaggaa

SEQ ID NO: 15252 - DNA, 21 bp, Homo sapiens
ccagatgactacgacgaggaa

SEQ ID NO: 15253 - DNA, 21 bp, Homo sapiens
aagtacagagtgagacttaaa

SEQ ID NO: 15254 - DNA, 21 bp, Homo sapiens
caccagttcaacactccatta

SEQ ID NO: 15255 - DNA, 21 bp, Homo sapiens
caaggctggtgtagagagaaa

SEQ ID NO: 15256 - DNA, 21 bp, Homo sapiens
aacgagcagactaaggagtaa

SEQ ID NO: 15257 - DNA, 21 bp, Homo sapiens
tcgaggtaccagagcatctta

SEQ ID NO: 15258 - DNA, 21 bp, Homo sapiens
cagcatcctctccaagattat

SEQ ID NO: 15259 - DNA, 21 bp, Homo sapiens
aactatttaaggaaccatcta

SEQ ID NO: 15260 - DNA, 21 bp, Homo sapiens
tggcgatagcatacggagcta

SEQ ID NO: 15261 - DNA, 21 bp, Homo sapiens
tccgatggccttcccatacaa

SEQ ID NO: 15262 - DNA, 21 bp, Homo sapiens
caggctgagagctgtgctgaa

SEQ ID NO: 15263 - DNA, 21 bp, Homo sapiens
cacggtggtgttcgccatctt

SEQ ID NO: 15264 - DNA, 21 bp, Homo sapiens
ctgcctcaagggctacgtcaa

SEQ ID NO: 15265 - DNA, 21 bp, Homo sapiens
gaccatcatcatcatgaccaa

SEQ ID NO: 15266 - DNA, 21 bp, Homo sapiens
cgggagcagccagttgatgaa

SEQ ID NO: 15267 - DNA, 21 bp, Homo sapiens
cacagccatgtgcagcctatt

SEQ ID NO: 15268 - DNA, 21 bp, Homo sapiens
tccaagcagtatatgaagcta

SEQ ID NO: 15269 - DNA, 21 bp, Homo sapiens
cagaccaattatgatccttaa

SEQ ID NO: 15270 - DNA, 21 bp, Homo sapiens
aaggaaatctttaatcaataa

SEQ ID NO: 15271 - DNA, 21 bp, Homo sapiens
atcattgtctttcttaggaaa

SEQ ID NO: 15272 - DNA, 21 bp, Homo sapiens
caggaccatctctgacattca

SEQ ID NO: 15273 - DNA, 21 bp, Homo sapiens
aacatttgttgttaatataat

SEQ ID NO: 15274 - DNA, 21 bp, Homo sapiens
aagtatccaggatgacctgaa

SEQ ID NO: 15275 - DNA, 21 bp, Homo sapiens
caccgtgtttgaagtgcccaa

SEQ ID NO: 15276 - DNA, 21 bp, Homo sapiens
ccggaggagcttcatcttcaa

SEQ ID NO: 15277 - DNA, 21 bp, Homo sapiens
ctggtagggattccaggttta

SEQ ID NO: 15278 - DNA, 21 bp, Homo sapiens
caccgctttggtcatcatgta

SEQ ID NO: 15279 - DNA, 21 bp, Homo sapiens
aacgctggtgcttagcaacaa

SEQ ID NO: 15280 - DNA, 21 bp, Homo sapiens
ctgaatctggagagtgatcaa

SEQ ID NO: 15281 - DNA, 21 bp, Homo sapiens
aacaatgtttagagtcatgaa

SEQ ID NO: 15282 - DNA, 21 bp, Homo sapiens
cagaaatggaataaatatcaa

SEQ ID NO: 15283 - DNA, 21 bp, Homo sapiens
caaagtcacatctttgtggca

SEQ ID NO: 15284 - DNA, 21 bp, Homo sapiens
gcgaagttagagcctagtgta

SEQ ID NO: 15285 - DNA, 21 bp, Homo sapiens
atggatttatagagaacatca

SEQ ID NO: 15286 - DNA, 21 bp, Homo sapiens
agagaatacatttaaattaaa

SEQ ID NO: 15287 - DNA, 21 bp, Homo sapiens
aggagaatcactttcacttaa

SEQ ID NO: 15288 - DNA, 21 bp, Homo sapiens
caccatctggttgcctggcaa

SEQ ID NO: 15289 - DNA, 21 bp, Homo sapiens
aagctacgatagagtcagata

SEQ ID NO: 15290 - DNA, 21 bp, Homo sapiens
cagggtagtgatgacctcaca

SEQ ID NO: 15291 - DNA, 21 bp, Homo sapiens
cagctgagtagggcaaatgaa

SEQ ID NO: 15292 - DNA, 21 bp, Homo sapiens
cagagtggcttagaacagtaa

SEQ ID NO: 15293 - DNA, 21 bp, Homo sapiens
cccggctgattggattcgtta

SEQ ID NO: 15294 - DNA, 21 bp, Homo sapiens
ctccatgaggctggtcctgaa

SEQ ID NO: 15295 - DNA, 21 bp, Homo sapiens
ctaataaacattggtattaaa

SEQ ID NO: 15296 - DNA, 21 bp, Homo sapiens
ctgcaaagaaatacttgataa

SEQ ID NO: 15297 - DNA, 21 bp, Homo sapiens
aaacatcacaatattcataca

SEQ ID NO: 15298 - DNA, 21 bp, Homo sapiens
aaacataatatggaacaatta

SEQ ID NO: 15299 - DNA, 21 bp, Homo sapiens
ctcctggagctgattgccaaa

SEQ ID NO: 15300 - DNA, 21 bp, Homo sapiens
aataaatatttgagaaatgaa

SEQ ID NO: 15301 - DNA, 21 bp, Homo sapiens
cagcctgaggaagcatcaata

SEQ ID NO: 15302 - DNA, 21 bp, Homo sapiens
ctgaggaagcatcaataaata

SEQ ID NO: 15303 - DNA, 21 bp, Homo sapiens
caccttgaggctgtctggcaa

SEQ ID NO: 15304 - DNA, 21 bp, Homo sapiens
atcattaaacctgctgtcaaa

SEQ ID NO: 15305 - DNA, 21 bp, Homo sapiens
cacggctataagattatttca

SEQ ID NO: 15306 - DNA, 21 bp, Homo sapiens
agcgctagtcagctagtctaa

SEQ ID NO: 15307 - DNA, 21 bp, Homo sapiens
cccgggagagccgcccttcta

SEQ ID NO: 15308 - DNA, 21 bp, Homo sapiens
ttcagacaccttcgtcttcaa

SEQ ID NO: 15309 - DNA, 21 bp, Homo sapiens
caggcggtgggtcgcaagcaa

SEQ ID NO: 15310 - DNA, 21 bp, Homo sapiens
ccgatgcctgtcaaattccta

SEQ ID NO: 15311 - DNA, 21 bp, Homo sapiens
cacgcttgatgggaacctgta

SEQ ID NO: 15312 - DNA, 21 bp, Homo sapiens
cagcctcaactccatcgagaa

SEQ ID NO: 15313 - DNA, 21 bp, Homo sapiens
caggcgaagtttgacacattt

SEQ ID NO: 15314 - DNA, 21 bp, Homo sapiens
cagggtgtggtcagccgcaaa

SEQ ID NO: 15315 - DNA, 21 bp, Homo sapiens
gccgctgactgtaacatgtaa

SEQ ID NO: 15316 - DNA, 21 bp, Homo sapiens
tagggaggtctcaataataaa

SEQ ID NO: 15317 - DNA, 21 bp, Homo sapiens
tatgttgtaattaaatttgaa

SEQ ID NO: 15318 - DNA, 21 bp, Homo sapiens
ctcaaggaacaaagaagataa

SEQ ID NO: 15319 - DNA, 21 bp, Homo sapiens
cagggtgaaatgagccttgaa

SEQ ID NO: 15320 - DNA, 21 bp, Homo sapiens
aagggataatttatacttcaa

SEQ ID NO: 15321 - DNA, 21 bp, Homo sapiens
ccaggaattgttgactttcaa

SEQ ID NO: 15322 - DNA, 21 bp, Homo sapiens
caagtgtaaattggtgattta

SEQ ID NO: 15323 - DNA, 21 bp, Homo sapiens
ctccgtcttctcagactacta

SEQ ID NO: 15324 - DNA, 21 bp, Homo sapiens
tagaggtgtcttctactcaaa

SEQ ID NO: 15325 - DNA, 21 bp, Homo sapiens
caggatcttcttcgacaacga

SEQ ID NO: 15326 - DNA, 21 bp, Homo sapiens
ccggaggagatgaacctgcaa

SEQ ID NO: 15327 - DNA, 21 bp, Homo sapiens
aaggactttctgtccatctaa

SEQ ID NO: 15328 - DNA, 21 bp, Homo sapiens
caccatcatccttactgataa

SEQ ID NO: 15329 - DNA, 21 bp, Homo sapiens
ttggtagaatttaccttataa

SEQ ID NO: 15330 - DNA, 21 bp, Homo sapiens
ctgaatgtttgtaccctctaa

SEQ ID NO: 15331 - DNA, 21 bp, Homo sapiens
cggagttgagctgatcatgaa

SEQ ID NO: 15332 - DNA, 21 bp, Homo sapiens
cacaatgagtcagaagatgaa

SEQ ID NO: 15333 - DNA, 21 bp, Homo sapiens
tacgcatactatgacactgaa

SEQ ID NO: 15334 - DNA, 21 bp, Homo sapiens
ccgcatgagcatcaaagccta

SEQ ID NO: 15335 - DNA, 21 bp, Homo sapiens
ctgggttgtgagctccttgaa

SEQ ID NO: 15336 - DNA, 21 bp, Homo sapiens
taccatggaatgggtcagaaa

SEQ ID NO: 15337 - DNA, 21 bp, Homo sapiens
cagctaaataattgctaaata

SEQ ID NO: 15338 - DNA, 21 bp, Homo sapiens
taggttcaacttcagcatata

SEQ ID NO: 15339 - DNA, 21 bp, Homo sapiens
ctgggcggcacgcactctcca

SEQ ID NO: 15340 - DNA, 21 bp, Homo sapiens
taggctggtgacacgtctcca

SEQ ID NO: 15341 - DNA, 21 bp, Homo sapiens
cagcctgaaaccaacacattt

SEQ ID NO: 15342 - DNA, 21 bp, Homo sapiens
cacattcagcttagaagtgga

SEQ ID NO: 15343 - DNA, 21 bp, Homo sapiens
tacagtacattagacattcaa

SEQ ID NO: 15344 - DNA, 21 bp, Homo sapiens
cagagcctatgtcaatggcaa

SEQ ID NO: 15345 - DNA, 21 bp, Homo sapiens
ccagaagatctcctacccgaa

SEQ ID NO: 15346 - DNA, 21 bp, Homo sapiens
cacgaacatcctgaccctcat

SEQ ID NO: 15347 - DNA, 21 bp, Homo sapiens
ctcggtgattgtgtccatcat

SEQ ID NO: 15348 - DNA, 21 bp, Homo sapiens
caggttcaataaggacatcga

SEQ ID NO: 15349 - DNA, 21 bp, Homo sapiens
ccggcatacagtcaccaccaa

SEQ ID NO: 15350 - DNA, 21 bp, Homo sapiens
atgcatcttaatcatttacaa

SEQ ID NO: 15351 - DNA, 21 bp, Homo sapiens
aggcaataaacttaaacaata

SEQ ID NO: 15352 - DNA, 21 bp, Homo sapiens
aaaggccattacaatatttaa

SEQ ID NO: 15353 - DNA, 21 bp, Homo sapiens
ctccgtggagagggtgccgga

SEQ ID NO: 15354 - DNA, 21 bp, Homo sapiens
cctgggaaaccttgcactcta

SEQ ID NO: 15355 - DNA, 21 bp, Homo sapiens
cagatgtttgtttctgctcta

SEQ ID NO: 15356 - DNA, 21 bp, Homo sapiens
aaggagcagaacatctgttaa

SEQ ID NO: 15357 - DNA, 21 bp, Homo sapiens
caggtatatgaagaaggatta

SEQ ID NO: 15358 - DNA, 21 bp, Homo sapiens
ctggaatataattcagaatta

SEQ ID NO: 15359 - DNA, 21 bp, Homo sapiens
atcgggatgctaagcaaataa

SEQ ID NO: 15360 - DNA, 21 bp, Homo sapiens
aagcttctgggtaaacacata

SEQ ID NO: 15361 - DNA, 21 bp, Homo sapiens
aagaataaacatggaccttat

SEQ ID NO: 15362 - DNA, 21 bp, Homo sapiens
ttggtgttgataagaaattaa

SEQ ID NO: 15363 - DNA, 21 bp, Homo sapiens
agagctagagtgattccttaa

SEQ ID NO: 15364 - DNA, 21 bp, Homo sapiens
accagtttccagccaatgcaa

SEQ ID NO: 15365 - DNA, 21 bp, Homo sapiens
caggactgtccgagtctacaa

SEQ ID NO: 15366 - DNA, 21 bp, Homo sapiens
gcgcaggactgtccgagtcta

SEQ ID NO: 15367 - DNA, 21 bp, Homo sapiens
ctggtaggttgtgctcaactt

SEQ ID NO: 15368 - DNA, 21 bp, Homo sapiens
tacaggatatcttatttgaaa

SEQ ID NO: 15369 - DNA, 21 bp, Homo sapiens
gcggacatacttagatcctaa

SEQ ID NO: 15370 - DNA, 21 bp, Homo sapiens
cagcattgtgccagagtgata

SEQ ID NO: 15371 - DNA, 21 bp, Homo sapiens
aaggtatgacagcatctgcaa

SEQ ID NO: 15372 - DNA, 21 bp, Homo sapiens
ccgggagaagagtgaagccaa

SEQ ID NO: 15373 - DNA, 21 bp, Homo sapiens
ctgcctgactcagatgcctaa

SEQ ID NO: 15374 - DNA, 21 bp, Homo sapiens
ccggaaactcaacatcaacta

SEQ ID NO: 15375 - DNA, 21 bp, Homo sapiens
ttgggtcagatgcttgatgaa

SEQ ID NO: 15376 - DNA, 21 bp, Homo sapiens
caacaagaaatcatcagtcaa

SEQ ID NO: 15377 - DNA, 21 bp, Homo sapiens
accaatgtatatgcacttgta

SEQ ID NO: 15378 - DNA, 21 bp, Homo sapiens
taggaagaagtggtaagctaa

SEQ ID NO: 15379 - DNA, 21 bp, Homo sapiens
aaggatgaagaagatgaagat

SEQ ID NO: 15380 - DNA, 21 bp, Homo sapiens
tgggcagtcgctgtcgcattt

SEQ ID NO: 15381 - DNA, 21 bp, Homo sapiens
aacattgatatgatagatgga

SEQ ID NO: 15382 - DNA, 21 bp, Homo sapiens
aaagttaataaagcaatttaa

SEQ ID NO: 15383 - DNA, 21 bp, Homo sapiens
ctgatttataacctgcattaa

SEQ ID NO: 15384 - DNA, 21 bp, Homo sapiens
ctgcagtagtttctaactcta

SEQ ID NO: 15385 - DNA, 21 bp, Homo sapiens
cagctttaccactctgatgaa

SEQ ID NO: 15386 - DNA, 21 bp, Homo sapiens
caggcagtgaattctggtgaa

SEQ ID NO: 15387 - DNA, 21 bp, Homo sapiens
caggatactccctcaaatcaa

SEQ ID NO: 15388 - DNA, 21 bp, Homo sapiens
caggactaaattggctgttaa

SEQ ID NO: 15389 - DNA, 21 bp, Homo sapiens
gcgctatgggacagtgttcaa

SEQ ID NO: 15390 - DNA, 21 bp, Homo sapiens
ccgggtgatgccctcgaccta

SEQ ID NO: 15391 - DNA, 21 bp, Homo sapiens
caccttcgagctcgacggcta

SEQ ID NO: 15392 - DNA, 21 bp, Homo sapiens
ctggagcgtgatgtatagcat

SEQ ID NO: 15393 - DNA, 21 bp, Homo sapiens
aacctggtattggagatgtta

SEQ ID NO: 15394 - DNA, 21 bp, Homo sapiens
ctgatttattaattagctata

SEQ ID NO: 15395 - DNA, 21 bp, Homo sapiens
aacagccatgtggaagtaata

SEQ ID NO: 15396 - DNA, 21 bp, Homo sapiens
ctgagtcatgtttctacctaa

SEQ ID NO: 15397 - DNA, 21 bp, Homo sapiens
aaggagtgagagtgaagcata

SEQ ID NO: 15398 - DNA, 21 bp, Homo sapiens
ccgggcagacaagtaactcaa

SEQ ID NO: 15399 - DNA, 21 bp, Homo sapiens
agggtggtgagaagaattaca

SEQ ID NO: 15400 - DNA, 21 bp, Homo sapiens
atggagttggtttcaagaaga

SEQ ID NO: 15401 - DNA, 21 bp, Homo sapiens
atcccttcatatatactttaa

SEQ ID NO: 15402 - DNA, 21 bp, Homo sapiens
cagcatgacaacaggaaataa

SEQ ID NO: 15403 - DNA, 21 bp, Homo sapiens
cagggagaaatttgatgacaa

SEQ ID NO: 15404 - DNA, 21 bp, Homo sapiens
caccgtgttctttgacacgga

SEQ ID NO: 15405 - DNA, 21 bp, Homo sapiens
taaggacgttaaagccaacaa

SEQ ID NO: 15406 - DNA, 21 bp, Homo sapiens
caacatgcttgtgttcattaa

SEQ ID NO: 15407 - DNA, 21 bp, Homo sapiens
accaacgttcatgctgaggta

SEQ ID NO: 15408 - DNA, 21 bp, Homo sapiens
cgggatcatgagggagtttca

SEQ ID NO: 15409 - DNA, 21 bp, Homo sapiens
ctgaaccacaatacaattaaa

SEQ ID NO: 15410 - DNA, 21 bp, Homo sapiens
ccggttgtttgtaatatttca

SEQ ID NO: 15411 - DNA, 21 bp, Homo sapiens
caggagtgccctggcaggcaa

SEQ ID NO: 15412 - DNA, 21 bp, Homo sapiens
aaggacgtgaacaccaagtta

SEQ ID NO: 15413 - DNA, 21 bp, Homo sapiens
ccggtagaagacatcctggaa

SEQ ID NO: 15414 - DNA, 21 bp, Homo sapiens
caccagttctcggaaatcaaa

SEQ ID NO: 15415 - DNA, 21 bp, Homo sapiens
acggagatgcccattatgaaa

SEQ ID NO: 15416 - DNA, 21 bp, Homo sapiens
cagctggatgatttcaattat

SEQ ID NO: 15417 - DNA, 21 bp, Homo sapiens
gaagctgtcggaaacattcaa

SEQ ID NO: 15418 - DNA, 21 bp, Homo sapiens
acagcatctgatagtggtgaa

SEQ ID NO: 15419 - DNA, 21 bp, Homo sapiens
cccgctaggcttcctgggaaa

SEQ ID NO: 15420 - DNA, 21 bp, Homo sapiens
ctggattctctgaacacccaa

SEQ ID NO: 15421 - DNA, 21 bp, Homo sapiens
aaggacttgtttcactgcaaa

SEQ ID NO: 15422 - DNA, 21 bp, Homo sapiens
caggaagaggtacaatttaaa

SEQ ID NO: 15423 - DNA, 21 bp, Homo sapiens
ccaagtgaacctatccgcaaa

SEQ ID NO: 15424 - DNA, 21 bp, Homo sapiens
cagggcatctgcactggagaa

SEQ ID NO: 15425 - DNA, 21 bp, Homo sapiens
cagcatgtggcacaagagaca

SEQ ID NO: 15426 - DNA, 21 bp, Homo sapiens
catcaagatcgcggagatcaa

SEQ ID NO: 15427 - DNA, 21 bp, Homo sapiens
ggcgctggtttccatcatcaa

SEQ ID NO: 15428 - DNA, 21 bp, Homo sapiens
aacgttgtactctcttcagaa

SEQ ID NO: 15429 - DNA, 21 bp, Homo sapiens
gagggaaataccagtgcttta

SEQ ID NO: 15430 - DNA, 21 bp, Homo sapiens
aacgatctcatcgtttctgaa

SEQ ID NO: 15431 - DNA, 21 bp, Homo sapiens
agccgggaaggagaaactcaa

SEQ ID NO: 15432 - DNA, 21 bp, Homo sapiens
acgtgtgcaataaatcattta

SEQ ID NO: 15433 - DNA, 21 bp, Homo sapiens
ctgaatctgagaggtctcaaa

SEQ ID NO: 15434 - DNA, 21 bp, Homo sapiens
aaggaatatcttatgcaggaa

SEQ ID NO: 15435 - DNA, 21 bp, Homo sapiens
cccgagcaacctctccagtta

SEQ ID NO: 15436 - DNA, 21 bp, Homo sapiens
ctcagtatctacaacacacaa

SEQ ID NO: 15437 - DNA, 21 bp, Homo sapiens
taacctaaagcttatctgtaa

SEQ ID NO: 15438 - DNA, 21 bp, Homo sapiens
cagggtataagtatgctgaga

SEQ ID NO: 15439 - DNA, 21 bp, Homo sapiens
cactcattcctcacacctaaa

SEQ ID NO: 15440 - DNA, 21 bp, Homo sapiens
atcggttaagatcgatggcaa

SEQ ID NO: 15441 - DNA, 21 bp, Homo sapiens
aacattgaagatcagtacaaa

SEQ ID NO: 15442 - DNA, 21 bp, Homo sapiens
caggaggagaaaccctatgaa

SEQ ID NO: 15443 - DNA, 21 bp, Homo sapiens
acgcctgtgctctttctgcaa

SEQ ID NO: 15444 - DNA, 21 bp, Homo sapiens
cacccgaaactcggcaggcaa

SEQ ID NO: 15445 - DNA, 21 bp, Homo sapiens
accactgggcatagagagaaa

SEQ ID NO: 15446 - DNA, 21 bp, Homo sapiens
acggagggagatctgaatcta

SEQ ID NO: 15447 - DNA, 21 bp, Homo sapiens
ttgagggaaggaaataattta

SEQ ID NO: 15448 - DNA, 21 bp, Homo sapiens
aagagttgattggcttattaa

SEQ ID NO: 15449 - DNA, 21 bp, Homo sapiens
cacctttgtctcctatgtgta

SEQ ID NO: 15450 - DNA, 21 bp, Homo sapiens
ctgggctttcctggttctcaa

SEQ ID NO: 15451 - DNA, 21 bp, Homo sapiens
atgattgtaagggaacagcaa

SEQ ID NO: 15452 - DNA, 21 bp, Homo sapiens
cccatggaatatgagcatgaa

SEQ ID NO: 15453 - DNA, 21 bp, Homo sapiens
tgccacattggtgatcctcta

SEQ ID NO: 15454 - DNA, 21 bp, Homo sapiens
atgtataacgatgacctagaa

SEQ ID NO: 15455 - DNA, 21 bp, Homo sapiens
cccaagatgcttatcaactta

SEQ ID NO: 15456 - DNA, 21 bp, Homo sapiens
atggaaggtagggataatgta

SEQ ID NO: 15457 - DNA, 21 bp, Homo sapiens
tacaggtaattagatgattta

SEQ ID NO: 15458 - DNA, 21 bp, Homo sapiens
cacaactgttattctgcccaa

SEQ ID NO: 15459 - DNA, 21 bp, Homo sapiens
cagggatggaagaatacacca

SEQ ID NO: 15460 - DNA, 21 bp, Homo sapiens
caccagaaagggaaagatgaa

SEQ ID NO: 15461 - DNA, 21 bp, Homo sapiens
cagacattcacacaaacttca

SEQ ID NO: 15462 - DNA, 21 bp, Homo sapiens
cagagagaggagtgagcccaa

SEQ ID NO: 15463 - DNA, 21 bp, Homo sapiens
cacacagagtgcaaccagtaa

SEQ ID NO: 15464 - DNA, 21 bp, Homo sapiens
cgccttatttctatcacccaa

SEQ ID NO: 15465 - DNA, 21 bp, Homo sapiens
accaaggagcttgataaagta

SEQ ID NO: 15466 - DNA, 21 bp, Homo sapiens
ttggcactagttgaacagaaa

SEQ ID NO: 15467 - DNA, 21 bp, Homo sapiens
aactgtgagattcgtccttta

SEQ ID NO: 15468 - DNA, 21 bp, Homo sapiens
aaccctttaatctatagtctt

SEQ ID NO: 15469 - DNA, 21 bp, Homo sapiens
cagacctgcattcatatacat

SEQ ID NO: 15470 - DNA, 21 bp, Homo sapiens
cagaggttgaacataccctaa

SEQ ID NO: 15471 - DNA, 21 bp, Homo sapiens
atggaacttgccagaaagaaa

SEQ ID NO: 15472 - DNA, 21 bp, Homo sapiens
cacaagggtgatggacattaa

SEQ ID NO: 15473 - DNA, 21 bp, Homo sapiens
cagcaaagttgatatccttaa

SEQ ID NO: 15474 - DNA, 21 bp, Homo sapiens
taccttctagagacaaataaa

SEQ ID NO: 15475 - DNA, 21 bp, Homo sapiens
aagctcttagtgagcatttaa

SEQ ID NO: 15476 - DNA, 21 bp, Homo sapiens
aaggatatttctgaagaagaa

SEQ ID NO: 15477 - DNA, 21 bp, Homo sapiens
aagccagaggattgcaaccaa

SEQ ID NO: 15478 - DNA, 21 bp, Homo sapiens
cacgaagactggaatctgtaa

SEQ ID NO: 15479 - DNA, 21 bp, Homo sapiens
acggaaccagtcggtcaggaa

SEQ ID NO: 15480 - DNA, 21 bp, Homo sapiens
ctgaattcgaatcactgttta

SEQ ID NO: 15481 - DNA, 21 bp, Homo sapiens
aagagttaagaaggcatgaga

SEQ ID NO: 15482 - DNA, 21 bp, Homo sapiens
caggatccgagcaaagctaaa

SEQ ID NO: 15483 - DNA, 21 bp, Homo sapiens
gaggatctatgcagaggccaa

SEQ ID NO: 15484 - DNA, 21 bp, Homo sapiens
cgccattgtgctgcacaccta

SEQ ID NO: 15485 - DNA, 21 bp, Homo sapiens
ccacttatgactaacttctta

SEQ ID NO: 15486 - DNA, 21 bp, Homo sapiens
cagcacaatataatagtggaa

SEQ ID NO: 15487 - DNA, 21 bp, Homo sapiens
caggaccaacttcgcagatca

SEQ ID NO: 15488 - DNA, 21 bp, Homo sapiens
aaagattcacatgatgaataa

SEQ ID NO: 15489 - DNA, 21 bp, Homo sapiens
taactattcaataaccaagaa

SEQ ID NO: 15490 - DNA, 21 bp, Homo sapiens
cccagcgttgtgatggagtaa

SEQ ID NO: 15491 - DNA, 21 bp, Homo sapiens
cccgagctactatcctccaaa

SEQ ID NO: 15492 - DNA, 21 bp, Homo sapiens
tcggattactcgtcaaccata

SEQ ID NO: 15493 - DNA, 21 bp, Homo sapiens
aaggatagaagccactcagta

SEQ ID NO: 15494 - DNA, 21 bp, Homo sapiens
ccaagtctgttgattgattta

SEQ ID NO: 15495 - DNA, 21 bp, Homo sapiens
ctgatcattctttatgtgaaa

SEQ ID NO: 15496 - DNA, 21 bp, Homo sapiens
agcgttgtccttactgatcat

SEQ ID NO: 15497 - DNA, 21 bp, Homo sapiens
aaggcgtgtgtcatgatacaa

SEQ ID NO: 15498 - DNA, 21 bp, Homo sapiens
atgcatggaatgtgaacacaa

SEQ ID NO: 15499 - DNA, 21 bp, Homo sapiens
cagggcttaacctgctagaaa

SEQ ID NO: 15500 - DNA, 21 bp, Homo sapiens
cacactcttcgtgcacttcta

SEQ ID NO: 15501 - DNA, 21 bp, Homo sapiens
cagcgctgcctctgaagccta

SEQ ID NO: 15502 - DNA, 21 bp, Homo sapiens
cacatgatgtggagaatgcta

SEQ ID NO: 15503 - DNA, 21 bp, Homo sapiens
cggaatgagaggattgcatta

SEQ ID NO: 15504 - DNA, 21 bp, Homo sapiens
tagggtgtcgtacttaccata

SEQ ID NO: 15505 - DNA, 21 bp, Homo sapiens
cagaggctgggcgatgttgaa

SEQ ID NO: 15506 - DNA, 21 bp, Homo sapiens
caggatgatcccagctttgat

SEQ ID NO: 15507 - DNA, 21 bp, Homo sapiens
ccagctttgattcactggaaa

SEQ ID NO: 15508 - DNA, 21 bp, Homo sapiens
cagcttcttacctcagtcaaa

SEQ ID NO: 15509 - DNA, 21 bp, Homo sapiens
aaggccaagagcaaggaaata

SEQ ID NO: 15510 - DNA, 21 bp, Homo sapiens
aagctgctgagagttggtaaa

SEQ ID NO: 15511 - DNA, 21 bp, Homo sapiens
aagaaagaagtgggtgatgta

SEQ ID NO: 15512 - DNA, 21 bp, Homo sapiens
taccaagacatttgaggtcaa

SEQ ID NO: 15513 - DNA, 21 bp, Homo sapiens
tccatcgatgatggagagaaa

SEQ ID NO: 15514 - DNA, 21 bp, Homo sapiens
ctcccactacatcaagactaa

SEQ ID NO: 15515 - DNA, 21 bp, Homo sapiens
ctgctgttctgtctgaattaa

SEQ ID NO: 15516 - DNA, 21 bp, Homo sapiens
accctagtaaatcatctgcta

SEQ ID NO: 15517 - DNA, 21 bp, Homo sapiens
tagaatttaggtcccttgtta

SEQ ID NO: 15518 - DNA, 21 bp, Homo sapiens
ctggatgagagatcttcctaa

SEQ ID NO: 15519 - DNA, 21 bp, Homo sapiens
aacgatcctgaagataataat

SEQ ID NO: 15520 - DNA, 21 bp, Homo sapiens
atgtggtaaattggacactaa

SEQ ID NO: 15521 - DNA, 21 bp, Homo sapiens
gaggaataatgctacatgtaa

SEQ ID NO: 15522 - DNA, 21 bp, Homo sapiens
aagcttggagcaagacatata

SEQ ID NO: 15523 - DNA, 21 bp, Homo sapiens
cagggaggcttctcagaccta

SEQ ID NO: 15524 - DNA, 21 bp, Homo sapiens
cacggtggagaccatattgtt

SEQ ID NO: 15525 - DNA, 21 bp, Homo sapiens
caggatgctctcagacctgtt

SEQ ID NO: 15526 - DNA, 21 bp, Homo sapiens
cagtagtaccatctttctgta

SEQ ID NO: 15527 - DNA, 21 bp, Homo sapiens
cagaaggtcattattcacaaa

SEQ ID NO: 15528 - DNA, 21 bp, Homo sapiens
aggcaccaatggtatcttcaa

SEQ ID NO: 15529 - DNA, 21 bp, Homo sapiens
aagagccctgctcaaagttta

SEQ ID NO: 15530 - DNA, 21 bp, Homo sapiens
ctcgtcatggttaccatttca

SEQ ID NO: 15531 - DNA, 21 bp, Homo sapiens
tagaaatatcctaatgcttat

SEQ ID NO: 15532 - DNA, 21 bp, Homo sapiens
cagtgggattagtgttcttaa

SEQ ID NO: 15533 - DNA, 21 bp, Homo sapiens
atgcctgtcaattcttatata

SEQ ID NO: 15534 - DNA, 21 bp, Homo sapiens
atcaattggaatagtcatcaa

SEQ ID NO: 15535 - DNA, 21 bp, Homo sapiens
cagcgagtgggccaaggccaa

SEQ ID NO: 15536 - DNA, 21 bp, Homo sapiens
ctgctgcaaatctatgaagta

SEQ ID NO: 15537 - DNA, 21 bp, Homo sapiens
ccgagtcaatgccttggccaa

SEQ ID NO: 15538 - DNA, 21 bp, Homo sapiens
ctggctcaatgtgcacacaaa

SEQ ID NO: 15539 - DNA, 21 bp, Homo sapiens
tatggccatgggcctcttcaa

SEQ ID NO: 15540 - DNA, 21 bp, Homo sapiens
aagcggcgtgccatggagcta

SEQ ID NO: 15541 - DNA, 21 bp, Homo sapiens
ctgagtgttgtgggtgggcta

SEQ ID NO: 15542 - DNA, 21 bp, Homo sapiens
aacgtgtttcagaatacacca

SEQ ID NO: 15543 - DNA, 21 bp, Homo sapiens
caccgctggctcaggatcaaa

SEQ ID NO: 15544 - DNA, 21 bp, Homo sapiens
aagctcattatgtgactccta

SEQ ID NO: 15545 - DNA, 21 bp, Homo sapiens
gacgttggaattgcatcctta

SEQ ID NO: 15546 - DNA, 21 bp, Homo sapiens
cagccataagagagcatcgta

SEQ ID NO: 15547 - DNA, 21 bp, Homo sapiens
caagaggtggctgggaaagtt

SEQ ID NO: 15548 - DNA, 21 bp, Homo sapiens
cgccatgggcagagtgaggaa

SEQ ID NO: 15549 - DNA, 21 bp, Homo sapiens
caggacttatcagctgggata

SEQ ID NO: 15550 - DNA, 21 bp, Homo sapiens
aggaaggttgattggaaataa

SEQ ID NO: 15551 - DNA, 21 bp, Homo sapiens
caggtgtagatcacctattat

SEQ ID NO: 15552 - DNA, 21 bp, Homo sapiens
tccgggttcccaagaactaaa

SEQ ID NO: 15553 - DNA, 21 bp, Homo sapiens
aaggcttgatttatcaggcaa

SEQ ID NO: 15554 - DNA, 21 bp, Homo sapiens
cagaaataatacattaaccaa

SEQ ID NO: 15555 - DNA, 21 bp, Homo sapiens
cccaatggtcttggatgattt

SEQ ID NO: 15556 - DNA, 21 bp, Homo sapiens
cagacaatggtgaccatgata

SEQ ID NO: 15557 - DNA, 21 bp, Homo sapiens
gcccaacattcaagaaattta

SEQ ID NO: 15558 - DNA, 21 bp, Homo sapiens
ccgtttctttaagataattat

SEQ ID NO: 15559 - DNA, 21 bp, Homo sapiens
ctcgcagttcctggtgctaat

SEQ ID NO: 15560 - DNA, 21 bp, Homo sapiens
ccctgtcatgctgatgggaaa

SEQ ID NO: 15561 - DNA, 21 bp, Homo sapiens
cccgatgtggcaggccctgaa

SEQ ID NO: 15562 - DNA, 21 bp, Homo sapiens
cagctttatggtacctggcta

SEQ ID NO: 15563 - DNA, 21 bp, Homo sapiens
ctggagatgtgaattccataa

SEQ ID NO: 15564 - DNA, 21 bp, Homo sapiens
aagcatctaagaggcaatgaa

SEQ ID NO: 15565 - DNA, 21 bp, Homo sapiens
caacagatgttcatatttcta

SEQ ID NO: 15566 - DNA, 21 bp, Homo sapiens
tacctttgataagatggctaa

SEQ ID NO: 15567 - DNA, 21 bp, Homo sapiens
aacgggattattcagtaggaa

SEQ ID NO: 15568 - DNA, 21 bp, Homo sapiens
cccagtcacctgacaaatcta

SEQ ID NO: 15569 - DNA, 21 bp, Homo sapiens
cacactgatgccagatgttaa

SEQ ID NO: 15570 - DNA, 21 bp, Homo sapiens
atggactttagttaatagtaa

SEQ ID NO: 15571 - DNA, 21 bp, Homo sapiens
gacacggccatcggtcactaa

SEQ ID NO: 15572 - DNA, 21 bp, Homo sapiens
cactaatctgcagcaccggaa

SEQ ID NO: 15573 - DNA, 21 bp, Homo sapiens
cagcaatttccgaatcaccta

SEQ ID NO: 15574 - DNA, 21 bp, Homo sapiens
atcgatgaggaaatcaagaaa

SEQ ID NO: 15575 - DNA, 21 bp, Homo sapiens
caggtatctgtcctcattcaa

SEQ ID NO: 15576 - DNA, 21 bp, Homo sapiens
ctggatgagttcaaaccttca

SEQ ID NO: 15577 - DNA, 21 bp, Homo sapiens
ctgtgtcattggcaaggacaa

SEQ ID NO: 15578 - DNA, 21 bp, Homo sapiens
ccgggcccgcggagacatgaa

SEQ ID NO: 15579 - DNA, 21 bp, Homo sapiens
cagcacagatggcacagccaa

SEQ ID NO: 15580 - DNA, 21 bp, Homo sapiens
caggatcctggttgccaacaa

SEQ ID NO: 15581 - DNA, 21 bp, Homo sapiens
atgcatgactgggacaagaaa

SEQ ID NO: 15582 - DNA, 21 bp, Homo sapiens
aaggtgagactccacatggaa

SEQ ID NO: 15583 - DNA, 21 bp, Homo sapiens
aaggtctaaatcacaaggata

SEQ ID NO: 15584 - DNA, 21 bp, Homo sapiens
aagggataaataataaattga

SEQ ID NO: 15585 - DNA, 21 bp, Homo sapiens
atggtgtcccatgcacagaaa

SEQ ID NO: 15586 - DNA, 21 bp, Homo sapiens
caggaggccctcctactacta

SEQ ID NO: 15587 - DNA, 21 bp, Homo sapiens
aacactggacgaggtcctcaa

SEQ ID NO: 15588 - DNA, 21 bp, Homo sapiens
ccgggtcttcgtcatgctcta

SEQ ID NO: 15589 - DNA, 21 bp, Homo sapiens
ctgacgcatgccttcccatat

SEQ ID NO: 15590 - DNA, 21 bp, Homo sapiens
agcgatctttggaggaaacaa

SEQ ID NO: 15591 - DNA, 21 bp, Homo sapiens
caggtcattagccagaataaa

SEQ ID NO: 15592 - DNA, 21 bp, Homo sapiens
cccgctcttacttacagtata

SEQ ID NO: 15593 - DNA, 21 bp, Homo sapiens
caggaagtatttctcatttag

SEQ ID NO: 15594 - DNA, 21 bp, Homo sapiens
ctccgttaacaggcagcataa

SEQ ID NO: 15595 - DNA, 21 bp, Homo sapiens
tcgggtactatcacccagaaa

SEQ ID NO: 15596 - DNA, 21 bp, Homo sapiens
ttgcctgagatgaaacatata

SEQ ID NO: 15597 - DNA, 21 bp, Homo sapiens
acggctgagattcgacaggtt

SEQ ID NO: 15598 - DNA, 21 bp, Homo sapiens
caggaataccgtctggttaaa

SEQ ID NO: 15599 - DNA, 21 bp, Homo sapiens
cctgatcttagtagcagacaa

SEQ ID NO: 15600 - DNA, 21 bp, Homo sapiens
ctccgtcctctatgaaccaaa

SEQ ID NO: 15601 - DNA, 21 bp, Homo sapiens
cccaatgattacccttaatta

SEQ ID NO: 15602 - DNA, 21 bp, Homo sapiens
ctgcttgaattgtatatatat

SEQ ID NO: 15603 - DNA, 21 bp, Homo sapiens
aaggcagatagtatatatata

SEQ ID NO: 15604 - DNA, 21 bp, Homo sapiens
aagcctaatgtctgtaattaa

SEQ ID NO: 15605 - DNA, 21 bp, Homo sapiens
gaggaccgtgtatgagagaaa

SEQ ID NO: 15606 - DNA, 21 bp, Homo sapiens
ctggaatattctgtcataaga

SEQ ID NO: 15607 - DNA, 21 bp, Homo sapiens
atgcaagctactgtgaattaa

SEQ ID NO: 15608 - DNA, 21 bp, Homo sapiens
cagcaggatgactatccttga

SEQ ID NO: 15609 - DNA, 21 bp, Homo sapiens
gagggtgaatccagagaacaa

SEQ ID NO: 15610 - DNA, 21 bp, Homo sapiens
cagccctgtgttcctcaccaa

SEQ ID NO: 15611 - DNA, 21 bp, Homo sapiens
aaagagtgaattgatacaaga

SEQ ID NO: 15612 - DNA, 21 bp, Homo sapiens
aaacagtacagtgaaattaca

SEQ ID NO: 15613 - DNA, 21 bp, Homo sapiens
ctggatcaagtgggcatgaaa

SEQ ID NO: 15614 - DNA, 21 bp, Homo sapiens
taggttgttaatactcgtgaa

SEQ ID NO: 15615 - DNA, 21 bp, Homo sapiens
ccaggaaagatgaacatccaa

SEQ ID NO: 15616 - DNA, 21 bp, Homo sapiens
accctggaaggtagcacataa

SEQ ID NO: 15617 - DNA, 21 bp, Homo sapiens
gaggatgaaattcagaattta

SEQ ID NO: 15618 - DNA, 21 bp, Homo sapiens
acgaagatgattacagtttaa

SEQ ID NO: 15619 - DNA, 21 bp, Homo sapiens
tccgttacccttgacctggaa

SEQ ID NO: 15620 - DNA, 21 bp, Homo sapiens
aaagaactggaccctcattta

SEQ ID NO: 15621 - DNA, 21 bp, Homo sapiens
taccctcactgggatcaacaa

SEQ ID NO: 15622 - DNA, 21 bp, Homo sapiens
ttggccaagaatcatcacgaa

SEQ ID NO: 15623 - DNA, 21 bp, Homo sapiens
cactttgagcctgccactgaa

SEQ ID NO: 15624 - DNA, 21 bp, Homo sapiens
caagagcttggcgatacagaa

SEQ ID NO: 15625 - DNA, 21 bp, Homo sapiens
atccagttctatgtcctataa

SEQ ID NO: 15626 - DNA, 21 bp, Homo sapiens
ccaggcaggactgacaataaa

SEQ ID NO: 15627 - DNA, 21 bp, Homo sapiens
cccgctggagttcgcctacta

SEQ ID NO: 15628 - DNA, 21 bp, Homo sapiens
acgggtagagacgaaatgcaa

SEQ ID NO: 15629 - DNA, 21 bp, Homo sapiens
ctggatattcctgaaatgcat

SEQ ID NO: 15630 - DNA, 21 bp, Homo sapiens
taggagaatactgtttacaaa

SEQ ID NO: 15631 - DNA, 21 bp, Homo sapiens
ctgaattcccatgaatacaaa

SEQ ID NO: 15632 - DNA, 21 bp, Homo sapiens
aagcaacaatacattctcgaa

SEQ ID NO: 15633 - DNA, 21 bp, Homo sapiens
atgcacttgcttgtgaattaa

SEQ ID NO: 15634 - DNA, 21 bp, Homo sapiens
tccaatggtttaggcattcaa

SEQ ID NO: 15635 - DNA, 21 bp, Homo sapiens
aaggattccttcagagattta

SEQ ID NO: 15636 - DNA, 21 bp, Homo sapiens
accatatagcagattagatta

SEQ ID NO: 15637 - DNA, 21 bp, Homo sapiens
aagaatgaattaagggagcaa

SEQ ID NO: 15638 - DNA, 21 bp, Homo sapiens
aaggactgtatttcaagggaa

SEQ ID NO: 15639 - DNA, 21 bp, Homo sapiens
cccgctcagttcaatatttca

SEQ ID NO: 15640 - DNA, 21 bp, Homo sapiens
caggttagacctggcagtaaa

SEQ ID NO: 15641 - DNA, 21 bp, Homo sapiens
acacttgatcttattaattta

SEQ ID NO: 15642 - DNA, 21 bp, Homo sapiens
cagcagagaagtggtacttta

SEQ ID NO: 15643 - DNA, 21 bp, Homo sapiens
ctcccagtgggcgcctatgaa

SEQ ID NO: 15644 - DNA, 21 bp, Homo sapiens
caggccgatggcaggtcttaa

SEQ ID NO: 15645 - DNA, 21 bp, Homo sapiens
aaggatctgcttgatatgatt

SEQ ID NO: 15646 - DNA, 21 bp, Homo sapiens
accaagtgaagtatagtataa

SEQ ID NO: 15647 - DNA, 21 bp, Homo sapiens
ctgggtggtatgggaagtgta

SEQ ID NO: 15648 - DNA, 21 bp, Homo sapiens
aaggattcaactatatttata

SEQ ID NO: 15649 - DNA, 21 bp, Homo sapiens
ctggtaatttgtcaaactgaa

SEQ ID NO: 15650 - DNA, 21 bp, Homo sapiens
caacatattattaaagtttaa

SEQ ID NO: 15651 - DNA, 21 bp, Homo sapiens
caccaatattatgtcattcaa

SEQ ID NO: 15652 - DNA, 21 bp, Homo sapiens
ccgaaaggacttaataatcaa

SEQ ID NO: 15653 - DNA, 21 bp, Homo sapiens
ctgcaccttgacattcagaaa

SEQ ID NO: 15654 - DNA, 21 bp, Homo sapiens
cagaagggtgtggacatgata

SEQ ID NO: 15655 - DNA, 21 bp, Homo sapiens
ctgcaccaacctcaacattaa

SEQ ID NO: 15656 - DNA, 21 bp, Homo sapiens
aaggactatatttgtactgta

SEQ ID NO: 15657 - DNA, 21 bp, Homo sapiens
tccgatgtcacaggcaacaaa

SEQ ID NO: 15658 - DNA, 21 bp, Homo sapiens
ctgctggagatctcaaatcaa

SEQ ID NO: 15659 - DNA, 21 bp, Homo sapiens
aagggcaatgggataaagcta

SEQ ID NO: 15660 - DNA, 21 bp, Homo sapiens
atgcactataagttaatataa

SEQ ID NO: 15661 - DNA, 21 bp, Homo sapiens
ctcagtgatgttagatggaaa

SEQ ID NO: 15662 - DNA, 21 bp, Homo sapiens
cagagggacactaagcattaa

SEQ ID NO: 15663 - DNA, 21 bp, Homo sapiens
cacagttgaagggacaggcaa

SEQ ID NO: 15664 - DNA, 21 bp, Homo sapiens
cagcgtctacactcacagcta

SEQ ID NO: 15665 - DNA, 21 bp, Homo sapiens
ccgtgaaaggatggaaacaaa

SEQ ID NO: 15666 - DNA, 21 bp, Homo sapiens
ctgcaggagtgagcaatttaa

SEQ ID NO: 15667 - DNA, 21 bp, Homo sapiens
cagagctgtcagaaagaataa

SEQ ID NO: 15668 - DNA, 21 bp, Homo sapiens
atgaaacatactcaagattta

SEQ ID NO: 15669 - DNA, 21 bp, Homo sapiens
gtccagctgctgagtgctcaa

SEQ ID NO: 15670 - DNA, 21 bp, Homo sapiens
aagcaggattctccagtctca

SEQ ID NO: 15671 - DNA, 21 bp, Homo sapiens
ttggaagaagtcatttgataa

SEQ ID NO: 15672 - DNA, 21 bp, Homo sapiens
cggaatagaagtcttattgaa

SEQ ID NO: 15673 - DNA, 21 bp, Homo sapiens
aagcacctgctcctccatgaa

SEQ ID NO: 15674 - DNA, 21 bp, Homo sapiens
aagattaagcctagttatata

SEQ ID NO: 15675 - DNA, 21 bp, Homo sapiens
tccggtgttcaccatggccaa

SEQ ID NO: 15676 - DNA, 21 bp, Homo sapiens
tccgatttggtgggcaaccaa

SEQ ID NO: 15677 - DNA, 21 bp, Homo sapiens
cagaatatagtttccactgta

SEQ ID NO: 15678 - DNA, 21 bp, Homo sapiens
tacaagtacgttacttattaa

SEQ ID NO: 15679 - DNA, 21 bp, Homo sapiens
tacgcagataatgatcattaa

SEQ ID NO: 15680 - DNA, 21 bp, Homo sapiens
aagcctgtttatgaaattcaa

SEQ ID NO: 15681 - DNA, 21 bp, Homo sapiens
acgggcctcgtgaccaccata

SEQ ID NO: 15682 - DNA, 21 bp, Homo sapiens
caggacgtcgggagcagggaa

SEQ ID NO: 15683 - DNA, 21 bp, Homo sapiens
gaccaccatagtcttcatcta

SEQ ID NO: 15684 - DNA, 21 bp, Homo sapiens
cagcgttggcgccaagcagaa

SEQ ID NO: 15685 - DNA, 21 bp, Homo sapiens
aacgtcatagtataccatcaa

SEQ ID NO: 15686 - DNA, 21 bp, Homo sapiens
ctgctagtattggacatataa

SEQ ID NO: 15687 - DNA, 21 bp, Homo sapiens
ttgagttgtcatgtagattaa

SEQ ID NO: 15688 - DNA, 21 bp, Homo sapiens
caggcagtttgtgaatattaa

SEQ ID NO: 15689 - DNA, 21 bp, Homo sapiens
ccggctctactgaacttcaga

SEQ ID NO: 15690 - DNA, 21 bp, Homo sapiens
ctgctcagatgtgagaagtaa

SEQ ID NO: 15691 - DNA, 21 bp, Homo sapiens
ccgggtgataggcattaacta

SEQ ID NO: 15692 - DNA, 21 bp, Homo sapiens
cagcatcaatgtgaagccaaa

SEQ ID NO: 15693 - DNA, 21 bp, Homo sapiens
gaggcaggcctcgccatttaa

SEQ ID NO: 15694 - DNA, 21 bp, Homo sapiens
cccggctggaatccagctcaa

SEQ ID NO: 15695 - DNA, 21 bp, Homo sapiens
aacacaatgatttgacaggaa

SEQ ID NO: 15696 - DNA, 21 bp, Homo sapiens
aacaactaatttatggaacaa

SEQ ID NO: 15697 - DNA, 21 bp, Homo sapiens
aaagatagacttcttcttaaa

SEQ ID NO: 15698 - DNA, 21 bp, Homo sapiens
ctgaagaatgaggaacataaa

SEQ ID NO: 15699 - DNA, 21 bp, Homo sapiens
caccagttccttaatcttaaa

SEQ ID NO: 15700 - DNA, 21 bp, Homo sapiens
cacagcgtgattattgctcca

SEQ ID NO: 15701 - DNA, 21 bp, Homo sapiens
accctcttcgctatccatcaa

SEQ ID NO: 15702 - DNA, 21 bp, Homo sapiens
aagtcttattatactgtcata

SEQ ID NO: 15703 - DNA, 21 bp, Homo sapiens
cagcaggcactgaatatacaa

SEQ ID NO: 15704 - DNA, 21 bp, Homo sapiens
caggcccatttctttcatcta

SEQ ID NO: 15705 - DNA, 21 bp, Homo sapiens
aagaaagacgccaaagagaaa

SEQ ID NO: 15706 - DNA, 21 bp, Homo sapiens
aacctatttcctatgaattca

SEQ ID NO: 15707 - DNA, 21 bp, Homo sapiens
aagaagattaatgatcactta

SEQ ID NO: 15708 - DNA, 21 bp, Homo sapiens
caggtctacattatttaatta

SEQ ID NO: 15709 - DNA, 21 bp, Homo sapiens
atggctgaaggcatttattta

SEQ ID NO: 15710 - DNA, 21 bp, Homo sapiens
agggagagacttatactttaa

SEQ ID NO: 15711 - DNA, 21 bp, Homo sapiens
cacctactaaatacaaataga

SEQ ID NO: 15712 - DNA, 21 bp, Homo sapiens
cagccagatatttgtggacaa

SEQ ID NO: 15713 - DNA, 21 bp, Homo sapiens
cagcctcatgtgggtttgtaa

SEQ ID NO: 15714 - DNA, 21 bp, Homo sapiens
cagggccgtgctgacacataa

SEQ ID NO: 15715 - DNA, 21 bp, Homo sapiens
aacagaaatgttaaactataa

SEQ ID NO: 15716 - DNA, 21 bp, Homo sapiens
aaacaggacatctatgacaaa

SEQ ID NO: 15717 - DNA, 21 bp, Homo sapiens
ccgtgtgatcctaaacatgtt

SEQ ID NO: 15718 - DNA, 21 bp, Homo sapiens
acacctcttcccatcatttaa

SEQ ID NO: 15719 - DNA, 21 bp, Homo sapiens
caaggttgttagagacttcaa

SEQ ID NO: 15720 - DNA, 21 bp, Homo sapiens
cagaaacatgttgcatgttaa

SEQ ID NO: 15721 - DNA, 21 bp, Homo sapiens
cagaaattggacagccagtaa

SEQ ID NO: 15722 - DNA, 21 bp, Homo sapiens
aaggagattcttggaaatgga

SEQ ID NO: 15723 - DNA, 21 bp, Homo sapiens
aaggagtaccttggatttgaa

SEQ ID NO: 15724 - DNA, 21 bp, Homo sapiens
aagagagataataaagtcaca

SEQ ID NO: 15725 - DNA, 21 bp, Homo sapiens
aagcagttgctgccaggctaa

SEQ ID NO: 15726 - DNA, 21 bp, Homo sapiens
aaagccagtcattgaattata

SEQ ID NO: 15727 - DNA, 21 bp, Homo sapiens
aacccgtgaattgtgtaaata

SEQ ID NO: 15728 - DNA, 21 bp, Homo sapiens
aacaatttacctggaaattaa

SEQ ID NO: 15729 - DNA, 21 bp, Homo sapiens
taggtatttaatgtattaata

SEQ ID NO: 15730 - DNA, 21 bp, Homo sapiens
aaggtacttgagaaacattaa

SEQ ID NO: 15731 - DNA, 21 bp, Homo sapiens
ctgggattacagaaagaagaa

SEQ ID NO: 15732 - DNA, 21 bp, Homo sapiens
cccggccaaatgagctattta

SEQ ID NO: 15733 - DNA, 21 bp, Homo sapiens
gagggaatcatggcaagccaa

SEQ ID NO: 15734 - DNA, 21 bp, Homo sapiens
ctcaatggtgaacacccgaaa

SEQ ID NO: 15735 - DNA, 21 bp, Homo sapiens
cacgacaatctcatcatatta

SEQ ID NO: 15736 - DNA, 21 bp, Homo sapiens
accaatgtatttcaacaatta

SEQ ID NO: 15737 - DNA, 21 bp, Homo sapiens
cacagagtctttccaactcaa

SEQ ID NO: 15738 - DNA, 21 bp, Homo sapiens
aacgctgtttctagtgcttaa

SEQ ID NO: 15739 - DNA, 21 bp, Homo sapiens
atggacaatgagaaacatgta

SEQ ID NO: 15740 - DNA, 21 bp, Homo sapiens
ctcagtaacaataacaagaaa

SEQ ID NO: 15741 - DNA, 21 bp, Homo sapiens
cgcgcagataatctggcataa

SEQ ID NO: 15742 - DNA, 21 bp, Homo sapiens
ctcttgggactcagaaatcaa

SEQ ID NO: 15743 - DNA, 21 bp, Homo sapiens
aaaggcatcaaaggtgatcaa

SEQ ID NO: 15744 - DNA, 21 bp, Homo sapiens
aaaggagatcgaggagagaaa

SEQ ID NO: 15745 - DNA, 21 bp, Homo sapiens
acaggtgaagaaaccctttaa

SEQ ID NO: 15746 - DNA, 21 bp, Homo sapiens
aaggatgctcttgacgccaaa

SEQ ID NO: 15747 - DNA, 21 bp, Homo sapiens
aaggaactggctggccctgaa

SEQ ID NO: 15748 - DNA, 21 bp, Homo sapiens
accggcaactgagatgtttaa

SEQ ID NO: 15749 - DNA, 21 bp, Homo sapiens
caacatttctggcaatttcta

SEQ ID NO: 15750 - DNA, 21 bp, Homo sapiens
aggcatcaacatttctggcaa

SEQ ID NO: 15751 - DNA, 21 bp, Homo sapiens
ctggacatcatttagcatata

SEQ ID NO: 15752 - DNA, 21 bp, Homo sapiens
caggaaagagattacttggaa

SEQ ID NO: 15753 - DNA, 21 bp, Homo sapiens
ccgggcattggtgtttgcaaa

SEQ ID NO: 15754 - DNA, 21 bp, Homo sapiens
aaggaggaaacggatcaccaa

SEQ ID NO: 15755 - DNA, 21 bp, Homo sapiens
atcggattcatctgacattta

SEQ ID NO: 15756 - DNA, 21 bp, Homo sapiens
ctggtttaaatgccaccttta

SEQ ID NO: 15757 - DNA, 21 bp, Homo sapiens
cccagaaacaaggcaaatgaa

SEQ ID NO: 15758 - DNA, 21 bp, Homo sapiens
cagatacatcaaataaagtta

SEQ ID NO: 15759 - DNA, 21 bp, Homo sapiens
taacagatctttgaacactaa

SEQ ID NO: 15760 - DNA, 21 bp, Homo sapiens
cacttaaagaagagaatttaa

SEQ ID NO: 15761 - DNA, 21 bp, Homo sapiens
caacatagactttgccttcaa

SEQ ID NO: 15762 - DNA, 21 bp, Homo sapiens
ccaaatgctttctatctctta

SEQ ID NO: 15763 - DNA, 21 bp, Homo sapiens
tccgtgcatgattgctttgaa

SEQ ID NO: 15764 - DNA, 21 bp, Homo sapiens
aaggatagtaatggtgatcaa

SEQ ID NO: 15765 - DNA, 21 bp, Homo sapiens
cagcaatacagtcacattcca

SEQ ID NO: 15766 - DNA, 21 bp, Homo sapiens
cagggtgtgtttgctggatta

SEQ ID NO: 15767 - DNA, 21 bp, Homo sapiens
ctcaaatgagaatcagcttaa

SEQ ID NO: 15768 - DNA, 21 bp, Homo sapiens
cacgctcttcttcctatgcaa

SEQ ID NO: 15769 - DNA, 21 bp, Homo sapiens
ctccacagaactgccagtaaa

SEQ ID NO: 15770 - DNA, 21 bp, Homo sapiens
acacgctaagtttatgtttaa

SEQ ID NO: 15771 - DNA, 21 bp, Homo sapiens
ttacaatgcagtaaactttaa

SEQ ID NO: 15772 - DNA, 21 bp, Homo sapiens
aaggaaccatggaaataacaa

SEQ ID NO: 15773 - DNA, 21 bp, Homo sapiens
aagaaatatcatgaaaggaaa

SEQ ID NO: 15774 - DNA, 21 bp, Homo sapiens
aacgatcatcgatgttgtcta

SEQ ID NO: 15775 - DNA, 21 bp, Homo sapiens
caaagcagaaacggaattaca

SEQ ID NO: 15776 - DNA, 21 bp, Homo sapiens
cacctggtgaatgaaatcaat

SEQ ID NO: 15777 - DNA, 21 bp, Homo sapiens
acggagacccaggaaagataa

SEQ ID NO: 15778 - DNA, 21 bp, Homo sapiens
cagccgagggcgagaaatgaa

SEQ ID NO: 15779 - DNA, 21 bp, Homo sapiens
cagccctcactagactacaaa

SEQ ID NO: 15780 - DNA, 21 bp, Homo sapiens
accataaaccatgcaatacaa

SEQ ID NO: 15781 - DNA, 21 bp, Homo sapiens
tccctgcgccatcttccagta

SEQ ID NO: 15782 - DNA, 21 bp, Homo sapiens
aacaggtgttaataaataaat

SEQ ID NO: 15783 - DNA, 21 bp, Homo sapiens
acagttgatcgcaaactagta

SEQ ID NO: 15784 - DNA, 21 bp, Homo sapiens
cagattgactatccagtttat

SEQ ID NO: 15785 - DNA, 21 bp, Homo sapiens
aagaggtttcaggctgcctta

SEQ ID NO: 15786 - DNA, 21 bp, Homo sapiens
ctcccttaacatagacattga

SEQ ID NO: 15787 - DNA, 21 bp, Homo sapiens
cagcaatctctgcatgccttt

SEQ ID NO: 15788 - DNA, 21 bp, Homo sapiens
cccaagagcttgtgtatcttt

SEQ ID NO: 15789 - DNA, 21 bp, Homo sapiens
aagccctctcaaagacactaa

SEQ ID NO: 15790 - DNA, 21 bp, Homo sapiens
atgggtgatagtggctttaaa

SEQ ID NO: 15791 - DNA, 21 bp, Homo sapiens
tgcaatcagactagaaggaaa

SEQ ID NO: 15792 - DNA, 21 bp, Homo sapiens
ccgggcatgattctcaacttt

SEQ ID NO: 15793 - DNA, 21 bp, Homo sapiens
cagaaccgatttggatttgga

SEQ ID NO: 15794 - DNA, 21 bp, Homo sapiens
agccaggattccagtacagaa

SEQ ID NO: 15795 - DNA, 21 bp, Homo sapiens
gcggctggatctgtaatgaaa

SEQ ID NO: 15796 - DNA, 21 bp, Homo sapiens
taggctgatgttaataaataa

SEQ ID NO: 15797 - DNA, 21 bp, Homo sapiens
tccgatgacttctgtccctaa

SEQ ID NO: 15798 - DNA, 21 bp, Homo sapiens
cccgctgttgggagtccttta

SEQ ID NO: 15799 - DNA, 21 bp, Homo sapiens
caggaagaacctcatacccaa

SEQ ID NO: 15800 - DNA, 21 bp, Homo sapiens
cagcatgtttctgatcatata

SEQ ID NO: 15801 - DNA, 21 bp, Homo sapiens
cagggatggaagtgaagtgat

SEQ ID NO: 15802 - DNA, 21 bp, Homo sapiens
ccaggtctttaggagaagaaa

SEQ ID NO: 15803 - DNA, 21 bp, Homo sapiens
cagcatctgaattacacttat

SEQ ID NO: 15804 - DNA, 21 bp, Homo sapiens
cagagttgtgttcacgaagaa

SEQ ID NO: 15805 - DNA, 21 bp, Homo sapiens
cagaatgccaagctccagtaa

SEQ ID NO: 15806 - DNA, 21 bp, Homo sapiens
cagaaggagcttgggaataca

SEQ ID NO: 15807 - DNA, 21 bp, Homo sapiens
caggcagaattagtgaccgat

SEQ ID NO: 15808 - DNA, 21 bp, Homo sapiens
cccaataaggctgctgactca

SEQ ID NO: 15809 - DNA, 21 bp, Homo sapiens
cagcaggctagtgatggttaa

SEQ ID NO: 15810 - DNA, 21 bp, Homo sapiens
ctgggtgtttgaaagaatcaa

SEQ ID NO: 15811 - DNA, 21 bp, Homo sapiens
ttgggattcatgctagatcaa

SEQ ID NO: 15812 - DNA, 21 bp, Homo sapiens
ttggctgtttctagaaagata

SEQ ID NO: 15813 - DNA, 21 bp, Homo sapiens
ctcactggtaaataaagttaa

SEQ ID NO: 15814 - DNA, 21 bp, Homo sapiens
atggttctgagtgatattaaa

SEQ ID NO: 15815 - DNA, 21 bp, Homo sapiens
accggtcatgcccatccggaa

SEQ ID NO: 15816 - DNA, 21 bp, Homo sapiens
aagggagacagttctgctgaa

SEQ ID NO: 15817 - DNA, 21 bp, Homo sapiens
caagagtagatctgagtttaa

SEQ ID NO: 15818 - DNA, 21 bp, Homo sapiens
cacctgattgttaaagataaa

SEQ ID NO: 15819 - DNA, 21 bp, Homo sapiens
cagcctccaaatttctttaaa

SEQ ID NO: 15820 - DNA, 21 bp, Homo sapiens
ccggctgaaattgtatacttt

SEQ ID NO: 15821 - DNA, 21 bp, Homo sapiens
ccggcgccgcgcggcgatgaa

SEQ ID NO: 15822 - DNA, 21 bp, Homo sapiens
tggaaagaaatcttgtaataa

SEQ ID NO: 15823 - DNA, 21 bp, Homo sapiens
caagttcatcaggtacctgta

SEQ ID NO: 15824 - DNA, 21 bp, Homo sapiens
cgccaagttcttcgacgtcaa

SEQ ID NO: 15825 - DNA, 21 bp, Homo sapiens
tagccttgtttgggatacaaa

SEQ ID NO: 15826 - DNA, 21 bp, Homo sapiens
cagctatttggcacatttcaa

SEQ ID NO: 15827 - DNA, 21 bp, Homo sapiens
cgggtccttcaactacctcaa

SEQ ID NO: 15828 - DNA, 21 bp, Homo sapiens
caggtacatcctgtccatcat

SEQ ID NO: 15829 - DNA, 21 bp, Homo sapiens
ctggtggaagctgcaggaaca

SEQ ID NO: 15830 - DNA, 21 bp, Homo sapiens
atgggcgtctcctaaccgtaa

SEQ ID NO: 15831 - DNA, 21 bp, Homo sapiens
cacggtcagcgtggcgaagta

SEQ ID NO: 15832 - DNA, 21 bp, Homo sapiens
tcagatcatcttcatgttgaa

SEQ ID NO: 15833 - DNA, 21 bp, Homo sapiens
caggctgtgcaggtcctggaa

SEQ ID NO: 15834 - DNA, 21 bp, Homo sapiens
tagcgtgttcaccgagtggaa

SEQ ID NO: 15835 - DNA, 21 bp, Homo sapiens
atgcaggcacttgacatttat

SEQ ID NO: 15836 - DNA, 21 bp, Homo sapiens
caccttgaacataacaggaaa

SEQ ID NO: 15837 - DNA, 21 bp, Homo sapiens
caggaagtatttatccaatga

SEQ ID NO: 15838 - DNA, 21 bp, Homo sapiens
cagaatcacaagtgaaataaa

SEQ ID NO: 15839 - DNA, 21 bp, Homo sapiens
accctatataaagatcttcaa

SEQ ID NO: 15840 - DNA, 21 bp, Homo sapiens
atctgcatcatcaacattata

SEQ ID NO: 15841 - DNA, 21 bp, Homo sapiens
cgggacccagtttatgggaaa

SEQ ID NO: 15842 - DNA, 21 bp, Homo sapiens
cgccttcagtactttccacaa

SEQ ID NO: 15843 - DNA, 21 bp, Homo sapiens
atggaacagtacatctataaa

SEQ ID NO: 15844 - DNA, 21 bp, Homo sapiens
aaggaggaatttcagggtgaa

SEQ ID NO: 15845 - DNA, 21 bp, Homo sapiens
cacggaggcatcttatgttaa

SEQ ID NO: 15846 - DNA, 21 bp, Homo sapiens
cccgtcgtaacttaaagggaa

SEQ ID NO: 15847 - DNA, 21 bp, Homo sapiens
caggagctttattccctatta

SEQ ID NO: 15848 - DNA, 21 bp, Homo sapiens
cagctttaacttgggatttaa

SEQ ID NO: 15849 - DNA, 21 bp, Homo sapiens
ctcacaagtgtcaccatggta

SEQ ID NO: 15850 - DNA, 21 bp, Homo sapiens
ctgggatagcttcctgaaata

SEQ ID NO: 15851 - DNA, 21 bp, Homo sapiens
ctgggtggtcctgaggaagaa

SEQ ID NO: 15852 - DNA, 21 bp, Homo sapiens
ctgattctcaacctaccataa

SEQ ID NO: 15853 - DNA, 21 bp, Homo sapiens
ctggtggacttggaatgttaa

SEQ ID NO: 15854 - DNA, 21 bp, Homo sapiens
cagcgatcacatcttattaaa

SEQ ID NO: 15855 - DNA, 21 bp, Homo sapiens
aaccttggagtgtacactgaa

SEQ ID NO: 15856 - DNA, 21 bp, Homo sapiens
aagggcagacatggagaagaa

SEQ ID NO: 15857 - DNA, 21 bp, Homo sapiens
ccgcacaggctgcaccatcaa

SEQ ID NO: 15858 - DNA, 21 bp, Homo sapiens
caggccctaaagaacggccaa

SEQ ID NO: 15859 - DNA, 21 bp, Homo sapiens
ctggagtgggtccaatatgaa

SEQ ID NO: 15860 - DNA, 21 bp, Homo sapiens
cacggcctttgtgaaagccaa

SEQ ID NO: 15861 - DNA, 21 bp, Homo sapiens
ctccctcctcacttggataaa

SEQ ID NO: 15862 - DNA, 21 bp, Homo sapiens
cagcgagtgaggcccagacaa

SEQ ID NO: 15863 - DNA, 21 bp, Homo sapiens
cagcgcttcgagcccatggaa

SEQ ID NO: 15864 - DNA, 21 bp, Homo sapiens
cagggagagtctgaagcgcca

SEQ ID NO: 15865 - DNA, 21 bp, Homo sapiens
aaggctttcactgatcacata

SEQ ID NO: 15866 - DNA, 21 bp, Homo sapiens
aagcatagagaggataagtaa

SEQ ID NO: 15867 - DNA, 21 bp, Homo sapiens
aacaaatgttcaacattcaaa

SEQ ID NO: 15868 - DNA, 21 bp, Homo sapiens
atgagggaggtggatgaacaa

SEQ ID NO: 15869 - DNA, 21 bp, Homo sapiens
ctggtgtctgaatatcagcaa

SEQ ID NO: 15870 - DNA, 21 bp, Homo sapiens
ccagcagatgtttgatgctaa

SEQ ID NO: 15871 - DNA, 21 bp, Homo sapiens
ccggttagaaatggccgcgga

SEQ ID NO: 15872 - DNA, 21 bp, Homo sapiens
ctgagtggatgtagatgagaa

SEQ ID NO: 15873 - DNA, 21 bp, Homo sapiens
cagaggtagctgcgtcctgaa

SEQ ID NO: 15874 - DNA, 21 bp, Homo sapiens
acccatctgtagctccctcaa

SEQ ID NO: 15875 - DNA, 21 bp, Homo sapiens
taccatgggatggttactgta

SEQ ID NO: 15876 - DNA, 21 bp, Homo sapiens
ccgtgttatttgggaaactca

SEQ ID NO: 15877 - DNA, 21 bp, Homo sapiens
aagccgagatagcttcctgaa

SEQ ID NO: 15878 - DNA, 21 bp, Homo sapiens
aaagaaagaagccaaagagaa

SEQ ID NO: 15879 - DNA, 21 bp, Homo sapiens
ctggcactacttctctctcaa

SEQ ID NO: 15880 - DNA, 21 bp, Homo sapiens
aaggatgttaccagtgcctta

SEQ ID NO: 15881 - DNA, 21 bp, Homo sapiens
aagggagtggatgttagggaa

SEQ ID NO: 15882 - DNA, 21 bp, Homo sapiens
caggacatccatggccaaata

SEQ ID NO: 15883 - DNA, 21 bp, Homo sapiens
aagcttgtataacactgacaa

SEQ ID NO: 15884 - DNA, 21 bp, Homo sapiens
cacatcatttctgaataggaa

SEQ ID NO: 15885 - DNA, 21 bp, Homo sapiens
ccgccagcagccggattacaa

SEQ ID NO: 15886 - DNA, 21 bp, Homo sapiens
cagggatgtgcgggttctcaa

SEQ ID NO: 15887 - DNA, 21 bp, Homo sapiens
ctggcattgtttactggagaa

SEQ ID NO: 15888 - DNA, 21 bp, Homo sapiens
aagggaagtcgacgaaataaa

SEQ ID NO: 15889 - DNA, 21 bp, Homo sapiens
caccctctccgtgtcctacaa

SEQ ID NO: 15890 - DNA, 21 bp, Homo sapiens
cagctacaataagcaggacaa

SEQ ID NO: 15891 - DNA, 21 bp, Homo sapiens
gtggtcgagaatgctgagaaa

SEQ ID NO: 15892 - DNA, 21 bp, Homo sapiens
ctggatttatggaaccaagaa

SEQ ID NO: 15893 - DNA, 21 bp, Homo sapiens
caggaatatataaagacatat

SEQ ID NO: 15894 - DNA, 21 bp, Homo sapiens
ccggatgattacccaaactat

SEQ ID NO: 15895 - DNA, 21 bp, Homo sapiens
ctgacttactgtttcaacaaa

SEQ ID NO: 15896 - DNA, 21 bp, Homo sapiens
cggatacaatagataatgtaa

SEQ ID NO: 15897 - DNA, 21 bp, Homo sapiens
aaggtggatgagaatggcaaa

SEQ ID NO: 15898 - DNA, 21 bp, Homo sapiens
tcggatacaatagataatgta

SEQ ID NO: 15899 - DNA, 21 bp, Homo sapiens
ttggtggtgactacacctaaa

SEQ ID NO: 15900 - DNA, 21 bp, Homo sapiens
ctcccactttgtgaagtttaa

SEQ ID NO: 15901 - DNA, 21 bp, Homo sapiens
cagcttctttgttccagtgaa

SEQ ID NO: 15902 - DNA, 21 bp, Homo sapiens
caccttctagggataaataaa

SEQ ID NO: 15903 - DNA, 21 bp, Homo sapiens
caggagggaaagtctaatgaa

SEQ ID NO: 15904 - DNA, 21 bp, Homo sapiens
aagaattgtgttggtcatgaa

SEQ ID NO: 15905 - DNA, 21 bp, Homo sapiens
caccttggtgagaatcaggaa

SEQ ID NO: 15906 - DNA, 21 bp, Homo sapiens
ccacagatacagattattaaa

SEQ ID NO: 15907 - DNA, 21 bp, Homo sapiens
accgtcagccacctcagtaga

SEQ ID NO: 15908 - DNA, 21 bp, Homo sapiens
aggctactacgtgaaggaaca

SEQ ID NO: 15909 - DNA, 21 bp, Homo sapiens
cagagaagaattaatgttgta

SEQ ID NO: 15910 - DNA, 21 bp, Homo sapiens
caggaagatggaggtcatcaa

SEQ ID NO: 15911 - DNA, 21 bp, Homo sapiens
cgggaagcacttaaccaatga

SEQ ID NO: 15912 - DNA, 21 bp, Homo sapiens
cagccaatcctagctcgttaa

SEQ ID NO: 15913 - DNA, 21 bp, Homo sapiens
cagacaataaacttagggcca

SEQ ID NO: 15914 - DNA, 21 bp, Homo sapiens
ttcgtgtaactgacagagata

SEQ ID NO: 15915 - DNA, 21 bp, Homo sapiens
ccatatgaaatttgcagttaa

SEQ ID NO: 15916 - DNA, 21 bp, Homo sapiens
agggagaatctcagactacaa

SEQ ID NO: 15917 - DNA, 21 bp, Homo sapiens
aaggatagcaagacaaatgaa

SEQ ID NO: 15918 - DNA, 21 bp, Homo sapiens
aaggaagttgaaggaaatcaa

SEQ ID NO: 15919 - DNA, 21 bp, Homo sapiens
cagctcctttctcaagcttta

SEQ ID NO: 15920 - DNA, 21 bp, Homo sapiens
cagggctttcaaggtaatgaa

SEQ ID NO: 15921 - DNA, 21 bp, Homo sapiens
ccagatttattacaacataaa

SEQ ID NO: 15922 - DNA, 21 bp, Homo sapiens
cgccataatgtgataaataaa

SEQ ID NO: 15923 - DNA, 21 bp, Homo sapiens
cacgttcttccaggtgcccta

SEQ ID NO: 15924 - DNA, 21 bp, Homo sapiens
acccaatgttcacacaagtaa

SEQ ID NO: 15925 - DNA, 21 bp, Homo sapiens
aacctcttcatcccagctgaa

SEQ ID NO: 15926 - DNA, 21 bp, Homo sapiens
aaagaacagctgattaaacta

SEQ ID NO: 15927 - DNA, 21 bp, Homo sapiens
caggttgacatcacatatgta

SEQ ID NO: 15928 - DNA, 21 bp, Homo sapiens
caggacgaagtcacacactaa

SEQ ID NO: 15929 - DNA, 21 bp, Homo sapiens
atggaacagtacatctataaa

SEQ ID NO: 15930 - DNA, 21 bp, Homo sapiens
aggaggaatttcaggacggga

SEQ ID NO: 15931 - DNA, 21 bp, Homo sapiens
agaagtagtcaccgccatgaa

SEQ ID NO: 15932 - DNA, 21 bp, Homo sapiens
gttattattcatattaattta

SEQ ID NO: 15933 - DNA, 21 bp, Homo sapiens
gccaggcagcaccctctgata

SEQ ID NO: 15934 - DNA, 21 bp, Homo sapiens
tcggactgagagcatttcctt

SEQ ID NO: 15935 - DNA, 21 bp, Homo sapiens
tagcagtgtgtgacaccataa

SEQ ID NO: 15936 - DNA, 21 bp, Homo sapiens
cgggagtgctctgcaactgaa

SEQ ID NO: 15937 - DNA, 21 bp, Homo sapiens
cagggcggttccaaactctaa

SEQ ID NO: 15938 - DNA, 21 bp, Homo sapiens
cagcatgatatgtctctgtaa

SEQ ID NO: 15939 - DNA, 21 bp, Homo sapiens
caacattattgtgactatcaa

SEQ ID NO: 15940 - DNA, 21 bp, Homo sapiens
aagagttataattacatttca

SEQ ID NO: 15941 - DNA, 21 bp, Homo sapiens
caagtttcagtgctcaatata

SEQ ID NO: 15942 - DNA, 21 bp, Homo sapiens
aagagatcagtcattacaata

SEQ ID NO: 15943 - DNA, 21 bp, Homo sapiens
taaggaagaaattatctataa

SEQ ID NO: 15944 - DNA, 21 bp, Homo sapiens
cagatttgaatcattaaagta

SEQ ID NO: 15945 - DNA, 21 bp, Homo sapiens
caccttacaggctgaccttaa

SEQ ID NO: 15946 - DNA, 21 bp, Homo sapiens
tcccacaaagttagaagcaaa

SEQ ID NO: 15947 - DNA, 21 bp, Homo sapiens
tacagcattctcgacctgtga

SEQ ID NO: 15948 - DNA, 21 bp, Homo sapiens
tgggaggcttgtgttgagtta

SEQ ID NO: 15949 - DNA, 21 bp, Homo sapiens
cctgaggaacaaggaatttaa

SEQ ID NO: 15950 - DNA, 21 bp, Homo sapiens
caccgtggtcaccgtcttcta

SEQ ID NO: 15951 - DNA, 21 bp, Homo sapiens
cacgccaataattaacccttt

SEQ ID NO: 15952 - DNA, 21 bp, Homo sapiens
ttgggtcaaacttcacactaa

SEQ ID NO: 15953 - DNA, 21 bp, Homo sapiens
caggtttctgcccgccaagaa

SEQ ID NO: 15954 - DNA, 21 bp, Homo sapiens
cacgtagttgcgagagcccaa

SEQ ID NO: 15955 - DNA, 21 bp, Homo sapiens
cagcctgccctgctttataaa

SEQ ID NO: 15956 - DNA, 21 bp, Homo sapiens
caggcacagcctgaagaggaa

SEQ ID NO: 15957 - DNA, 21 bp, Homo sapiens
aagcattgaatggaagacatt

SEQ ID NO: 15958 - DNA, 21 bp, Homo sapiens
cagggctaatgaaccatctaa

SEQ ID NO: 15959 - DNA, 21 bp, Homo sapiens
ccctggagactcattcctaca

SEQ ID NO: 15960 - DNA, 21 bp, Homo sapiens
tcccgaggctacaacacagaa

SEQ ID NO: 15961 - DNA, 21 bp, Homo sapiens
gtgcatattcctgatcctagt

SEQ ID NO: 15962 - DNA, 21 bp, Homo sapiens
aggcatgcctgccatcttcat

SEQ ID NO: 15963 - DNA, 21 bp, Homo sapiens
aaggccagtaagaccagggaa

SEQ ID NO: 15964 - DNA, 21 bp, Homo sapiens
cagcactggcaaggccagtaa

SEQ ID NO: 15965 - DNA, 21 bp, Homo sapiens
cacacagtatttgtttcttca

SEQ ID NO: 15966 - DNA, 21 bp, Homo sapiens
aaggaacaactgtatcttata

SEQ ID NO: 15967 - DNA, 21 bp, Homo sapiens
aaggtatattctagacctcat

SEQ ID NO: 15968 - DNA, 21 bp, Homo sapiens
aaatgttagtttattactgta

SEQ ID NO: 15969 - DNA, 21 bp, Homo sapiens
ccggtcctctcttgcccacta

SEQ ID NO: 15970 - DNA, 21 bp, Homo sapiens
tcgggcttggatttggagaaa

SEQ ID NO: 15971 - DNA, 21 bp, Homo sapiens
ccggctctggctccaaacaaa

SEQ ID NO: 15972 - DNA, 21 bp, Homo sapiens
ccgagtgtggtttgctatcaa

SEQ ID NO: 15973 - DNA, 21 bp, Homo sapiens
ccgggcttcccttgatgttaa

SEQ ID NO: 15974 - DNA, 21 bp, Homo sapiens
accgctggagttagaaatgta

SEQ ID NO: 15975 - DNA, 21 bp, Homo sapiens
cagaaagtctgagaaaggata

SEQ ID NO: 15976 - DNA, 21 bp, Homo sapiens
caggttgtcattggaagtcca

SEQ ID NO: 15977 - DNA, 21 bp, Homo sapiens
aaggatatctgtcacagatat

SEQ ID NO: 15978 - DNA, 21 bp, Homo sapiens
cacaactaaatgaaagcctaa

SEQ ID NO: 15979 - DNA, 21 bp, Homo sapiens
agacatgaaatatgacatata

SEQ ID NO: 15980 - DNA, 21 bp, Homo sapiens
cagattggctcagaaaccata

SEQ ID NO: 15981 - DNA, 21 bp, Homo sapiens
aagcaacaggaagcaaatgaa

SEQ ID NO: 15982 - DNA, 21 bp, Homo sapiens
caccaagagtagactgataaa

SEQ ID NO: 15983 - DNA, 21 bp, Homo sapiens
caggatagaaattggaggcta

SEQ ID NO: 15984 - DNA, 21 bp, Homo sapiens
agggaatgatttagcaataaa

SEQ ID NO: 15985 - DNA, 21 bp, Homo sapiens
ccgggcagctgtctccctcta

SEQ ID NO: 15986 - DNA, 21 bp, Homo sapiens
caggcggaatccatccaagta

SEQ ID NO: 15987 - DNA, 21 bp, Homo sapiens
tggcacctgaagaaagcatta

SEQ ID NO: 15988 - DNA, 21 bp, Homo sapiens
aacgccattcatttctctaaa

SEQ ID NO: 15989 - DNA, 21 bp, Homo sapiens
aaggaactaagagttgcagaa

SEQ ID NO: 15990 - DNA, 21 bp, Homo sapiens
cagctgagaatacataccaaa

SEQ ID NO: 15991 - DNA, 21 bp, Homo sapiens
tcccagaatagcccacattaa

SEQ ID NO: 15992 - DNA, 21 bp, Homo sapiens
cacgggagaactcataatgaa

SEQ ID NO: 15993 - DNA, 21 bp, Homo sapiens
aagaatgaactaaggtgtcta

SEQ ID NO: 15994 - DNA, 21 bp, Homo sapiens
aacctttgtgaagctcaacaa

SEQ ID NO: 15995 - DNA, 21 bp, Homo sapiens
cagaatgtccggccttatata

SEQ ID NO: 15996 - DNA, 21 bp, Homo sapiens
cagcgcctatatttgaataaa

SEQ ID NO: 15997 - DNA, 21 bp, Homo sapiens
cagaatcgaggcatctgttga

SEQ ID NO: 15998 - DNA, 21 bp, Homo sapiens
cagcatcgagaacaagctaat

SEQ ID NO: 15999 - DNA, 21 bp, Homo sapiens
cgcgctcagagccgccagaaa

SEQ ID NO: 16000 - DNA, 21 bp, Homo sapiens
cgggctgttgtaaagccgaaa

SEQ ID NO: 16001 - DNA, 21 bp, Homo sapiens
ccgggacgcctcacagcccaa

SEQ ID NO: 16002 - DNA, 21 bp, Homo sapiens
caggaagctcagaatgggtta

SEQ ID NO: 16003 - DNA, 21 bp, Homo sapiens
ctctccgaattgaaacactaa

SEQ ID NO: 16004 - DNA, 21 bp, Homo sapiens
taagaagattggcgaaattta

SEQ ID NO: 16005 - DNA, 21 bp, Homo sapiens
accaagttcaatgctgatgaa

SEQ ID NO: 16006 - DNA, 21 bp, Homo sapiens
ccaataaattctactaactct

SEQ ID NO: 16007 - DNA, 21 bp, Homo sapiens
cacagaggctacaactagaaa

SEQ ID NO: 16008 - DNA, 21 bp, Homo sapiens
caggcattatcgggactataa

SEQ ID NO: 16009 - DNA, 21 bp, Homo sapiens
ctgggagacaagagtccggaa

SEQ ID NO: 16010 - DNA, 21 bp, Homo sapiens
ccggatgtccagaatgatgaa

SEQ ID NO: 16011 - DNA, 21 bp, Homo sapiens
cagcttagtatctgcacataa

SEQ ID NO: 16012 - DNA, 21 bp, Homo sapiens
cagggattgcatcatattcat

SEQ ID NO: 16013 - DNA, 21 bp, Homo sapiens
tccaacaaactgtgtctttaa

SEQ ID NO: 16014 - DNA, 21 bp, Homo sapiens
taggatgggaaacaaggttaa

SEQ ID NO: 16015 - DNA, 21 bp, Homo sapiens
ttgttccagttcaatgattaa

SEQ ID NO: 16016 - DNA, 21 bp, Homo sapiens
atggaatctgtctctccttaa

SEQ ID NO: 16017 - DNA, 21 bp, Homo sapiens
cagctatgatactcagagaaa

SEQ ID NO: 16018 - DNA, 21 bp, Homo sapiens
caggaatatttcacccaagta

SEQ ID NO: 16019 - DNA, 21 bp, Homo sapiens
ctgcatcaactgcctccctta

SEQ ID NO: 16020 - DNA, 21 bp, Homo sapiens
ctcaccttactttcaccttaa

SEQ ID NO: 16021 - DNA, 21 bp, Homo sapiens
ccagccctttggaagagagta

SEQ ID NO: 16022 - DNA, 21 bp, Homo sapiens
ccaggccttagccctgagcta

SEQ ID NO: 16023 - DNA, 21 bp, Homo sapiens
aagactgatctttgctggaaa

SEQ ID NO: 16024 - DNA, 21 bp, Homo sapiens
ctggctgtcctgaaatattat

SEQ ID NO: 16025 - DNA, 21 bp, Homo sapiens
ctgatctttgctggaaagcaa

SEQ ID NO: 16026 - DNA, 21 bp, Homo sapiens
aaggtggatgagaatggcaaa

SEQ ID NO: 16027 - DNA, 21 bp, Homo sapiens
gaggatcaaattatagtttca

SEQ ID NO: 16028 - DNA, 21 bp, Homo sapiens
gcggttgaatccagtcataaa

SEQ ID NO: 16029 - DNA, 21 bp, Homo sapiens
aagagctgaggagaagattaa

SEQ ID NO: 16030 - DNA, 21 bp, Homo sapiens
caagcaggctgtcaccgtgca

SEQ ID NO: 16031 - DNA, 21 bp, Homo sapiens
ccggatgctaacacccaggaa

SEQ ID NO: 16032 - DNA, 21 bp, Homo sapiens
cccagatgcatttattagaaa

SEQ ID NO: 16033 - DNA, 21 bp, Homo sapiens
caggatagtcaaggacctcta

SEQ ID NO: 16034 - DNA, 21 bp, Homo sapiens
aagagagaatgtaatacacaa

SEQ ID NO: 16035 - DNA, 21 bp, Homo sapiens
ccaccttatattatagtcaaa

SEQ ID NO: 16036 - DNA, 21 bp, Homo sapiens
caggcactccttgatgaaata

SEQ ID NO: 16037 - DNA, 21 bp, Homo sapiens
cggctgcaccgcggcatgaat

SEQ ID NO: 16038 - DNA, 21 bp, Homo sapiens
ctgtctgtggtctttggagaa

SEQ ID NO: 16039 - DNA, 21 bp, Homo sapiens
cgggaacgctggtaactacaa

SEQ ID NO: 16040 - DNA, 21 bp, Homo sapiens
caggatttacatggctgggta

SEQ ID NO: 16041 - DNA, 21 bp, Homo sapiens
ctggaatgcctttgtacatat

SEQ ID NO: 16042 - DNA, 21 bp, Homo sapiens
cttgcctgaacttcccaagaa

SEQ ID NO: 16043 - DNA, 21 bp, Homo sapiens
cagggatggcagtcccaggat

SEQ ID NO: 16044 - DNA, 21 bp, Homo sapiens
cccgccgctaccgggcaggaa

SEQ ID NO: 16045 - DNA, 21 bp, Homo sapiens
ttcaatctatctgaagcttta

SEQ ID NO: 16046 - DNA, 21 bp, Homo sapiens
aagagtcttgaaagtccttaa

SEQ ID NO: 16047 - DNA, 21 bp, Homo sapiens
aagagtcatcttcaataccta

SEQ ID NO: 16048 - DNA, 21 bp, Homo sapiens
tagaaagaaatgaaatgataa

SEQ ID NO: 16049 - DNA, 21 bp, Homo sapiens
aagaattggatgcagctatga

SEQ ID NO: 16050 - DNA, 21 bp, Homo sapiens
aagcttgtgtatcatccatta

SEQ ID NO: 16051 - DNA, 21 bp, Homo sapiens
gaggatttagagggcaagcaa

SEQ ID NO: 16052 - DNA, 21 bp, Homo sapiens
caggactttgacagcattcat

SEQ ID NO: 16053 - DNA, 21 bp, Homo sapiens
ctggcggtgaatgactttgaa

SEQ ID NO: 16054 - DNA, 21 bp, Homo sapiens
ccgggagaagttctatgccaa

SEQ ID NO: 16055 - DNA, 21 bp, Homo sapiens
ccacgcagagatgacagccaa

SEQ ID NO: 16056 - DNA, 21 bp, Homo sapiens
cacgtacacacgggagcgcaa

SEQ ID NO: 16057 - DNA, 21 bp, Homo sapiens
tagcatttacatgatgtttat

SEQ ID NO: 16058 - DNA, 21 bp, Homo sapiens
aaggattggaattaactttat

SEQ ID NO: 16059 - DNA, 21 bp, Homo sapiens
cccaatctcctttggatataa

SEQ ID NO: 16060 - DNA, 21 bp, Homo sapiens
ctgatttgtggtcttcattta

SEQ ID NO: 16061 - DNA, 21 bp, Homo sapiens
cccgaggtggatgagggtgct

SEQ ID NO: 16062 - DNA, 21 bp, Homo sapiens
ctgcctcttgcctgcagcgat

SEQ ID NO: 16063 - DNA, 21 bp, Homo sapiens
caagtccatctttgaacaata

SEQ ID NO: 16064 - DNA, 21 bp, Homo sapiens
cgggaccgaggtgcagcagtt

SEQ ID NO: 16065 - DNA, 21 bp, Homo sapiens
aagaaattgtagcgccagtaa

SEQ ID NO: 16066 - DNA, 21 bp, Homo sapiens
aacctaaatttaattaataaa

SEQ ID NO: 16067 - DNA, 21 bp, Homo sapiens
aagatgctatgaatccagaaa

SEQ ID NO: 16068 - DNA, 21 bp, Homo sapiens
tcgcatctggataatccttca

SEQ ID NO: 16069 - DNA, 21 bp, Homo sapiens
tcgagccattgtcgccttcta

SEQ ID NO: 16070 - DNA, 21 bp, Homo sapiens
cagaaacagcagaagcgttaa

SEQ ID NO: 16071 - DNA, 21 bp, Homo sapiens
caacgcctgcctctacttcaa

SEQ ID NO: 16072 - DNA, 21 bp, Homo sapiens
gaccgtgtaccaggacatcaa

SEQ ID NO: 16073 - DNA, 21 bp, Homo sapiens
caggagaacgccagcccttat

SEQ ID NO: 16074 - DNA, 21 bp, Homo sapiens
ctaccataacactgaaataaa

SEQ ID NO: 16075 - DNA, 21 bp, Homo sapiens
atccctctattcgggaattaa

SEQ ID NO: 16076 - DNA, 21 bp, Homo sapiens
ctggatgttcgcgatggacaa

SEQ ID NO: 16077 - DNA, 21 bp, Homo sapiens
ctgattgttgctggacaacaa

SEQ ID NO: 16078 - DNA, 21 bp, Homo sapiens
gccgatcagcataacattaaa

SEQ ID NO: 16079 - DNA, 21 bp, Homo sapiens
gtccttgattccaatcatgaa

SEQ ID NO: 16080 - DNA, 21 bp, Homo sapiens
cagctgcgaggtcgccatcaa

SEQ ID NO: 16081 - DNA, 21 bp, Homo sapiens
caggattgggtggataaatat

SEQ ID NO: 16082 - DNA, 21 bp, Homo sapiens
ctggatgccaatcgagattta

SEQ ID NO: 16083 - DNA, 21 bp, Homo sapiens
aaggaggaatttcagggtgaa

SEQ ID NO: 16084 - DNA, 21 bp, Homo sapiens
tccgggaatactggccaggga

SEQ ID NO: 16085 - DNA, 21 bp, Homo sapiens
atgggtggcgatgttgaagaa

SEQ ID NO: 16086 - DNA, 21 bp, Homo sapiens
cagcaccatactggaacttca

SEQ ID NO: 16087 - DNA, 21 bp, Homo sapiens
ccgcctgccaaccgccttcaa

SEQ ID NO: 16088 - DNA, 21 bp, Homo sapiens
cacgctggtcaccgtgggtga

SEQ ID NO: 16089 - DNA, 21 bp, Homo sapiens
caacggcactgtgaagagaaa

SEQ ID NO: 16090 - DNA, 21 bp, Homo sapiens
ctcagcttatacacacctgaa

SEQ ID NO: 16091 - DNA, 21 bp, Homo sapiens
aagatatattctataccacaa

SEQ ID NO: 16092 - DNA, 21 bp, Homo sapiens
aaggttgctatgagtaatgta

SEQ ID NO: 16093 - DNA, 21 bp, Homo sapiens
ttggtgtgtgatgtggcttaa

SEQ ID NO: 16094 - DNA, 21 bp, Homo sapiens
ctgggtagtctggacaatgca

SEQ ID NO: 16095 - DNA, 21 bp, Homo sapiens
cagctaaggaacactgtgtaa

SEQ ID NO: 16096 - DNA, 21 bp, Homo sapiens
caggaatggattctccacata

SEQ ID NO: 16097 - DNA, 21 bp, Homo sapiens
tacatccaaagttgcccataa

SEQ ID NO: 16098 - DNA, 21 bp, Homo sapiens
ctcactgagactggagtcgaa

SEQ ID NO: 16099 - DNA, 21 bp, Homo sapiens
cagccagagacaagaagagta

SEQ ID NO: 16100 - DNA, 21 bp, Homo sapiens
aaggttgttatctttattgat

SEQ ID NO: 16101 - DNA, 21 bp, Homo sapiens
cacaacttatgatgtttataa

SEQ ID NO: 16102 - DNA, 21 bp, Homo sapiens
atccgttacgttggtgaccaa

SEQ ID NO: 16103 - DNA, 21 bp, Homo sapiens
ctcaatgacgtgtacagttta

SEQ ID NO: 16104 - DNA, 21 bp, Homo sapiens
cagcatgagatacaccaacaa

SEQ ID NO: 16105 - DNA, 21 bp, Homo sapiens
ttccaacatcatcaccatcaa

SEQ ID NO: 16106 - DNA, 21 bp, Homo sapiens
acccaccttctttgaaatata

SEQ ID NO: 16107 - DNA, 21 bp, Homo sapiens
cccagtgattgcccattgcta

SEQ ID NO: 16108 - DNA, 21 bp, Homo sapiens
cccatggtcaatcctatcata

SEQ ID NO: 16109 - DNA, 21 bp, Homo sapiens
cacaggtttggttcacacata

SEQ ID NO: 16110 - DNA, 21 bp, Homo sapiens
ttagttataatcaaatatgaa

SEQ ID NO: 16111 - DNA, 21 bp, Homo sapiens
tcggagtgacattgaccacaa

SEQ ID NO: 16112 - DNA, 21 bp, Homo sapiens
acccatttatctatagcatta

SEQ ID NO: 16113 - DNA, 21 bp, Homo sapiens
cacagataccaccttcaataa

SEQ ID NO: 16114 - DNA, 21 bp, Homo sapiens
cccaatcatatacagcattaa

SEQ ID NO: 16115 - DNA, 21 bp, Homo sapiens
atccatgttaacaacatttat

SEQ ID NO: 16116 - DNA, 21 bp, Homo sapiens
caggcattcctgggatacaaa

SEQ ID NO: 16117 - DNA, 21 bp, Homo sapiens
tcccaagatgcctgccagaaa

SEQ ID NO: 16118 - DNA, 21 bp, Homo sapiens
tcccaggatgccttacacaaa

SEQ ID NO: 16119 - DNA, 21 bp, Homo sapiens
cagatcagagataaggttata

SEQ ID NO: 16120 - DNA, 21 bp, Homo sapiens
taccaccatcttgactcccaa

SEQ ID NO: 16121 - DNA, 21 bp, Homo sapiens
accagcttcatttattctgaa

SEQ ID NO: 16122 - DNA, 21 bp, Homo sapiens
tccctttactttcctcaccaa

SEQ ID NO: 16123 - DNA, 21 bp, Homo sapiens
cccaagaaattaagcagggaa

SEQ ID NO: 16124 - DNA, 21 bp, Homo sapiens
ctgcgatgatgtcaccatcaa

SEQ ID NO: 16125 - DNA, 21 bp, Homo sapiens
ctccctgatatcactctctta

SEQ ID NO: 16126 - DNA, 21 bp, Homo sapiens
taggcattggtatccatttaa

SEQ ID NO: 16127 - DNA, 21 bp, Homo sapiens
gcccaagacagaagttatgaa

SEQ ID NO: 16128 - DNA, 21 bp, Homo sapiens
ctggatgatagttcatgtaat

SEQ ID NO: 16129 - DNA, 21 bp, Homo sapiens
caagaacatttgcatctctct

SEQ ID NO: 16130 - DNA, 21 bp, Homo sapiens
ttacatgtatggcttccttaa

SEQ ID NO: 16131 - DNA, 21 bp, Homo sapiens
ttcccagcttaacagacttaa

SEQ ID NO: 16132 - DNA, 21 bp, Homo sapiens
caggagggaatttctgtctga

SEQ ID NO: 16133 - DNA, 21 bp, Homo sapiens
tgggacagtaatcttcatcta

SEQ ID NO: 16134 - DNA, 21 bp, Homo sapiens
aagaaagtgttgagaaggcaa

SEQ ID NO: 16135 - DNA, 21 bp, Homo sapiens
cggcctctggctctacggcaa

SEQ ID NO: 16136 - DNA, 21 bp, Homo sapiens
ctgcctctggatcgagggcaa

SEQ ID NO: 16137 - DNA, 21 bp, Homo sapiens
ccagccacaggcagacactaa

SEQ ID NO: 16138 - DNA, 21 bp, Homo sapiens
cagctagattctgagggtcca

SEQ ID NO: 16139 - DNA, 21 bp, Homo sapiens
caaatggacactaccatggaa

SEQ ID NO: 16140 - DNA, 21 bp, Homo sapiens
caggaccattctgtcagccta

SEQ ID NO: 16141 - DNA, 21 bp, Homo sapiens
cccactgctctgtgcagtgaa

SEQ ID NO: 16142 - DNA, 21 bp, Homo sapiens
ctggacctcagggtctaacaa

SEQ ID NO: 16143 - DNA, 21 bp, Homo sapiens
ctcctacacctgcaagagcaa

SEQ ID NO: 16144 - DNA, 21 bp, Homo sapiens
ctgcctgcaaacggcacttta

SEQ ID NO: 16145 - DNA, 21 bp, Homo sapiens
taccaggaggctggcattcca

SEQ ID NO: 16146 - DNA, 21 bp, Homo sapiens
accaggttaccatatacttca

SEQ ID NO: 16147 - DNA, 21 bp, Homo sapiens
ctggacaaagaggaatgacat

SEQ ID NO: 16148 - DNA, 21 bp, Homo sapiens
aagactcttgtaattgggtta

SEQ ID NO: 16149 - DNA, 21 bp, Homo sapiens
aaggaagaggataatcactat

SEQ ID NO: 16150 - DNA, 21 bp, Homo sapiens
ctgagcgaagcagacatggaa

SEQ ID NO: 16151 - DNA, 21 bp, Homo sapiens
acccagactatgtgtcattaa

SEQ ID NO: 16152 - DNA, 21 bp, Homo sapiens
cactctgattactcaatctta

SEQ ID NO: 16153 - DNA, 21 bp, Homo sapiens
aagctgaacctcaaccaaata

SEQ ID NO: 16154 - DNA, 21 bp, Homo sapiens
caagagatttgttcaatgaaa

SEQ ID NO: 16155 - DNA, 21 bp, Homo sapiens
cacagtaatcacagaattcat

SEQ ID NO: 16156 - DNA, 21 bp, Homo sapiens
aagactggtcatgcaaagtaa

SEQ ID NO: 16157 - DNA, 21 bp, Homo sapiens
atggatgccatggatggagtt

SEQ ID NO: 16158 - DNA, 21 bp, Homo sapiens
gcacatcctcagaggaaataa

SEQ ID NO: 16159 - DNA, 21 bp, Homo sapiens
aagcacctatatgcccttcta

SEQ ID NO: 16160 - DNA, 21 bp, Homo sapiens
ctggaaggacaggttgttaaa

SEQ ID NO: 16161 - DNA, 21 bp, Homo sapiens
aagctgttgagagaaaggaaa

SEQ ID NO: 16162 - DNA, 21 bp, Homo sapiens
aaggaaagttaaggccaccaa

SEQ ID NO: 16163 - DNA, 21 bp, Homo sapiens
cgagatcatgctcaacggtaa

SEQ ID NO: 16164 - DNA, 21 bp, Homo sapiens
aacgtcagagtgaaatatgta

SEQ ID NO: 16165 - DNA, 21 bp, Homo sapiens
ccagacaaactcagagcttca

SEQ ID NO: 16166 - DNA, 21 bp, Homo sapiens
ctggtggtggtcatcgaagaa

SEQ ID NO: 16167 - DNA, 21 bp, Homo sapiens
aagaaagaagctgcccagaaa

SEQ ID NO: 16168 - DNA, 21 bp, Homo sapiens
cagctctcatcttgcagtaca

SEQ ID NO: 16169 - DNA, 21 bp, Homo sapiens
caggtgtgcagagatacttga

SEQ ID NO: 16170 - DNA, 21 bp, Homo sapiens
cagcaccaatgaagacaggaa

SEQ ID NO: 16171 - DNA, 21 bp, Homo sapiens
cacccaccgtttcatcaccaa

SEQ ID NO: 16172 - DNA, 21 bp, Homo sapiens
cagaagagctggcgtcatgaa

SEQ ID NO: 16173 - DNA, 21 bp, Homo sapiens
cagggtctccatggcctgtca

SEQ ID NO: 16174 - DNA, 21 bp, Homo sapiens
atgactctgattccacattaa

SEQ ID NO: 16175 - DNA, 21 bp, Homo sapiens
aggtagatggtttgaccttaa

SEQ ID NO: 16176 - DNA, 21 bp, Homo sapiens
tcgagacatcaggaccttcta

SEQ ID NO: 16177 - DNA, 21 bp, Homo sapiens
ctgcctgcatttgttcctaaa

SEQ ID NO: 16178 - DNA, 21 bp, Homo sapiens
caggagtgagatcccacccaa

SEQ ID NO: 16179 - DNA, 21 bp, Homo sapiens
aacagtgataagagaattcat

SEQ ID NO: 16180 - DNA, 21 bp, Homo sapiens
aaggtgtttaataagcacata

SEQ ID NO: 16181 - DNA, 21 bp, Homo sapiens
ttggattccttggatacccaa

SEQ ID NO: 16182 - DNA, 21 bp, Homo sapiens
tgggacagtcatggtaatgta

SEQ ID NO: 16183 - DNA, 21 bp, Homo sapiens
aacgtattcctcatactataa

SEQ ID NO: 16184 - DNA, 21 bp, Homo sapiens
aaggagtgtattgtaatttaa

SEQ ID NO: 16185 - DNA, 21 bp, Homo sapiens
caagaggaaagtgatctctta

SEQ ID NO: 16186 - DNA, 21 bp, Homo sapiens
ctcctacttcttaattctcaa

SEQ ID NO: 16187 - DNA, 21 bp, Homo sapiens
gaccctggaggaagaagcaaa

SEQ ID NO: 16188 - DNA, 21 bp, Homo sapiens
caggcgtttgctgcctcctta

SEQ ID NO: 16189 - DNA, 21 bp, Homo sapiens
cccactctcatggatgcctta

SEQ ID NO: 16190 - DNA, 21 bp, Homo sapiens
acactcagtattggtagataa

SEQ ID NO: 16191 - DNA, 21 bp, Homo sapiens
ctgaggtgggtctgactcaga

SEQ ID NO: 16192 - DNA, 21 bp, Homo sapiens
aagcaggtaggtgcgaatgaa

SEQ ID NO: 16193 - DNA, 21 bp, Homo sapiens
agcagtgtttcttctctatca

SEQ ID NO: 16194 - DNA, 21 bp, Homo sapiens
cagcttcatcatcctggttca

SEQ ID NO: 16195 - DNA, 21 bp, Homo sapiens
accgatgggtacagaggccca

SEQ ID NO: 16196 - DNA, 21 bp, Homo sapiens
ctccctactctttgcgaggaa

SEQ ID NO: 16197 - DNA, 21 bp, Homo sapiens
cagggtcagccgaatgccaga

SEQ ID NO: 16198 - DNA, 21 bp, Homo sapiens
atggacgaccttctgaacaaa

SEQ ID NO: 16199 - DNA, 21 bp, Homo sapiens
ctgtctcaccgaagatgttaa

SEQ ID NO: 16200 - DNA, 21 bp, Homo sapiens
cacgaatgtaccagtgaacaa

SEQ ID NO: 16201 - DNA, 21 bp, Homo sapiens
ccgagctgggtcggagcatga

SEQ ID NO: 16202 - DNA, 21 bp, Homo sapiens
tggcccggagttagaggccaa

SEQ ID NO: 16203 - DNA, 21 bp, Homo sapiens
caggtggacatgtaaagaaga

SEQ ID NO: 16204 - DNA, 21 bp, Homo sapiens
cagcagctgaaggacagataa

SEQ ID NO: 16205 - DNA, 21 bp, Homo sapiens
ttgctcgtggaggaagacctt

SEQ ID NO: 16206 - DNA, 21 bp, Homo sapiens
ctggaggaacagttccggaga

SEQ ID NO: 16207 - DNA, 21 bp, Homo sapiens
cggctcgatgtctgcaggcaa

SEQ ID NO: 16208 - DNA, 21 bp, Homo sapiens
gtggaggaagatggacaacta

SEQ ID NO: 16209 - DNA, 21 bp, Homo sapiens
cacactgaacttccagaactt

SEQ ID NO: 16210 - DNA, 21 bp, Homo sapiens
caccactgtggacaacaacta

SEQ ID NO: 16211 - DNA, 21 bp, Homo sapiens
ctgaggaacctgcaagactca

SEQ ID NO: 16212 - DNA, 21 bp, Homo sapiens
accaatgacagtatccagtat

SEQ ID NO: 16213 - DNA, 21 bp, Homo sapiens
aagggctttcctgcagcgcaa

SEQ ID NO: 16214 - DNA, 21 bp, Homo sapiens
cagagaaagtctatacatcta

SEQ ID NO: 16215 - DNA, 21 bp, Homo sapiens
ctggtccacgcagatgtcaaa

SEQ ID NO: 16216 - DNA, 21 bp, Homo sapiens
ctggtcacccatcgtcagaaa

SEQ ID NO: 16217 - DNA, 21 bp, Homo sapiens
cccggcaaacagtctgaggaa

SEQ ID NO: 16218 - DNA, 21 bp, Homo sapiens
atgaactagatccaaatccaa

SEQ ID NO: 16219 - DNA, 21 bp, Homo sapiens
ccgcctggaggagacccacaa

SEQ ID NO: 16220 - DNA, 21 bp, Homo sapiens
gacggccatgttcgacttcaa

SEQ ID NO: 16221 - DNA, 21 bp, Homo sapiens
caccctctatgacacaaccta

SEQ ID NO: 16222 - DNA, 21 bp, Homo sapiens
caaggacatgaagatgcataa

SEQ ID NO: 16223 - DNA, 21 bp, Homo sapiens
atgatggatagtgacaccata

SEQ ID NO: 16224 - DNA, 21 bp, Homo sapiens
atgaacaactctacaacataa

SEQ ID NO: 16225 - DNA, 21 bp, Homo sapiens
cacctttacatgacccaagaa

SEQ ID NO: 16226 - DNA, 21 bp, Homo sapiens
tcctataatttcacaaccaaa

SEQ ID NO: 16227 - DNA, 21 bp, Homo sapiens
cagattgaagttactttgtca

SEQ ID NO: 16228 - DNA, 21 bp, Homo sapiens
ctgaaggttcatggtgcctta

SEQ ID NO: 16229 - DNA, 21 bp, Homo sapiens
cagctctgctaaggacttgaa

SEQ ID NO: 16230 - DNA, 21 bp, Homo sapiens
ttcatctgagtttgagattaa

SEQ ID NO: 16231 - DNA, 21 bp, Homo sapiens
cagtttcatttgactcctcaa

SEQ ID NO: 16232 - DNA, 21 bp, Homo sapiens
ctggatttaacggaagtaatt

SEQ ID NO: 16233 - DNA, 21 bp, Homo sapiens
caccctaatatctgtgtcata

SEQ ID NO: 16234 - DNA, 21 bp, Homo sapiens
ccaagactaattacacttcaa

SEQ ID NO: 16235 - DNA, 21 bp, Homo sapiens
aaggtcattgtcactgtccaa

SEQ ID NO: 16236 - DNA, 21 bp, Homo sapiens
atgaggctaggtgggaaggaa

SEQ ID NO: 16237 - DNA, 21 bp, Homo sapiens
gtgacttccaaccaaatcaaa

SEQ ID NO: 16238 - DNA, 21 bp, Homo sapiens
ccacattcacaggaagattat

SEQ ID NO: 16239 - DNA, 21 bp, Homo sapiens
ttcctgcttcaccaccctcaa

SEQ ID NO: 16240 - DNA, 21 bp, Homo sapiens
aggattctgctcagccagtaa

SEQ ID NO: 16241 - DNA, 21 bp, Homo sapiens
ccagcagagacactacaatca

SEQ ID NO: 16242 - DNA, 21 bp, Homo sapiens
caagagggcacgggaggccaa

SEQ ID NO: 16243 - DNA, 21 bp, Homo sapiens
ctccatattccttattgccaa

SEQ ID NO: 16244 - DNA, 21 bp, Homo sapiens
caccctcactccaatgctcaa

SEQ ID NO: 16245 - DNA, 21 bp, Homo sapiens
atggctctaattggaaaccta

SEQ ID NO: 16246 - DNA, 21 bp, Homo sapiens
taggattcttcccaccatcaa

SEQ ID NO: 16247 - DNA, 21 bp, Homo sapiens
ctggaggagcagcgtcacgca

SEQ ID NO: 16248 - DNA, 21 bp, Homo sapiens
cgacatcgtctctgctctgaa

SEQ ID NO: 16249 - DNA, 21 bp, Homo sapiens
ctggtcgatcgcacttgtaca

SEQ ID NO: 16250 - DNA, 21 bp, Homo sapiens
cacgggctgtgctgaatgaca

SEQ ID NO: 16251 - DNA, 21 bp, Homo sapiens
ccgaaataaagacacaagaaa

SEQ ID NO: 16252 - DNA, 21 bp, Homo sapiens
ccggctgtaatggcaacctta

SEQ ID NO: 16253 - DNA, 21 bp, Homo sapiens
cccaagaagggcagaggaaca

SEQ ID NO: 16254 - DNA, 21 bp, Homo sapiens
cgggaccaagtctgtcactaa

SEQ ID NO: 16255 - DNA, 21 bp, Homo sapiens
atccctatattgaggagcaaa

SEQ ID NO: 16256 - DNA, 21 bp, Homo sapiens
ctgcccatcatctgtatccta

SEQ ID NO: 16257 - DNA, 21 bp, Homo sapiens
caggccctgctgagctagcaa

SEQ ID NO: 16258 - DNA, 21 bp, Homo sapiens
cagatatgtgttgtcctgtta

SEQ ID NO: 16259 - DNA, 21 bp, Homo sapiens
caaaggctttggtgtgttcaa

SEQ ID NO: 16260 - DNA, 21 bp, Homo sapiens
aagattgggcttcacccataa

SEQ ID NO: 16261 - DNA, 21 bp, Homo sapiens
cagatggcatagagcatccaa

SEQ ID NO: 16262 - DNA, 21 bp, Homo sapiens
aagatgggatagagcatccaa

SEQ ID NO: 16263 - DNA, 21 bp, Homo sapiens
cagggacttcatcagctgcta

SEQ ID NO: 16264 - DNA, 21 bp, Homo sapiens
caggacctgtttggagaacga

SEQ ID NO: 16265 - DNA, 21 bp, Homo sapiens
caggagatatttaggtaccaa

SEQ ID NO: 16266 - DNA, 21 bp, Homo sapiens
tcggacaaggatggaaacttt

SEQ ID NO: 16267 - DNA, 21 bp, Homo sapiens
ccacatctactgcatgatcaa

SEQ ID NO: 16268 - DNA, 21 bp, Homo sapiens
aagattggatgttatatatta

SEQ ID NO: 16269 - DNA, 21 bp, Homo sapiens
aagagaaggatgataaagaaa

SEQ ID NO: 16270 - DNA, 21 bp, Homo sapiens
aagaattataagcacatttca

SEQ ID NO: 16271 - DNA, 21 bp, Homo sapiens
atcaggtgagagcgtgtgaaa

SEQ ID NO: 16272 - DNA, 21 bp, Homo sapiens
ctggtgaatttgagaagtgta

SEQ ID NO: 16273 - DNA, 21 bp, Homo sapiens
caccagaacagtggtcatctt

SEQ ID NO: 16274 - DNA, 21 bp, Homo sapiens
acagagaaatgtgaataagaa

SEQ ID NO: 16275 - DNA, 21 bp, Homo sapiens
ctggatggaattccttcccaa

SEQ ID NO: 16276 - DNA, 21 bp, Homo sapiens
aagaacttgctccatcattaa

SEQ ID NO: 16277 - DNA, 21 bp, Homo sapiens
gtcagagacggagaaagataa

SEQ ID NO: 16278 - DNA, 21 bp, Homo sapiens
caccatcacggcacactccat

SEQ ID NO: 16279 - DNA, 21 bp, Homo sapiens
cacgcagctgctcctgcgcaa

SEQ ID NO: 16280 - DNA, 21 bp, Homo sapiens
ctccgcagagagggtccttaa

SEQ ID NO: 16281 - DNA, 21 bp, Homo sapiens
ctcatcaacaattacggccca

SEQ ID NO: 16282 - DNA, 21 bp, Homo sapiens
cagcgtcatgataacgtgaac

SEQ ID NO: 16283 - DNA, 21 bp, Homo sapiens
cacactttctagcccgtacaa

SEQ ID NO: 16284 - DNA, 21 bp, Homo sapiens
ccgaagggcgtagtcacagaa

SEQ ID NO: 16285 - DNA, 21 bp, Homo sapiens
ctcagtttggaggaattggaa

SEQ ID NO: 16286 - DNA, 21 bp, Homo sapiens
ccaggacatggcggtcaacaa

SEQ ID NO: 16287 - DNA, 21 bp, Homo sapiens
tgggttgatggtggaggtaga

SEQ ID NO: 16288 - DNA, 21 bp, Homo sapiens
ccctggaatctctacactaaa

SEQ ID NO: 16289 - DNA, 21 bp, Homo sapiens
ccggacttcgctgctcccgaa

SEQ ID NO: 16290 - DNA, 21 bp, Homo sapiens
caggccagcagcatccttata

SEQ ID NO: 16291 - DNA, 21 bp, Homo sapiens
acgggcgcggtcagtgcctga

SEQ ID NO: 16292 - DNA, 21 bp, Homo sapiens
acggtgaagacctgagattta

SEQ ID NO: 16293 - DNA, 21 bp, Homo sapiens
acgcaccagtttcttgcttta

SEQ ID NO: 16294 - DNA, 21 bp, Homo sapiens
ctgagtgatgaggaaatgaaa

SEQ ID NO: 16295 - DNA, 21 bp, Homo sapiens
aagggaagaattacacaggaa

SEQ ID NO: 16296 - DNA, 21 bp, Homo sapiens
caggtacacgtaagaaagaaa

SEQ ID NO: 16297 - DNA, 21 bp, Homo sapiens
cacctatgacacaaatgtcaa

SEQ ID NO: 16298 - DNA, 21 bp, Homo sapiens
ctgctgaagaatcaagtataa

SEQ ID NO: 16299 - DNA, 21 bp, Homo sapiens
cacctcagcccttacctggaa

SEQ ID NO: 16300 - DNA, 21 bp, Homo sapiens
tgccatggtgtattacgtcaa

SEQ ID NO: 16301 - DNA, 21 bp, Homo sapiens
tggacccaaattgcttacgat

SEQ ID NO: 16302 - DNA, 21 bp, Homo sapiens
caggtacattactcctcagca

SEQ ID NO: 16303 - DNA, 21 bp, Homo sapiens
caagatcctggcagtgctgaa

SEQ ID NO: 16304 - DNA, 21 bp, Homo sapiens
ccctctgtgctcagccatgta

SEQ ID NO: 16305 - DNA, 21 bp, Homo sapiens
aagggactttctggtcaccca

SEQ ID NO: 16306 - DNA, 21 bp, Homo sapiens
aaggatgtgaaagaggcagta

SEQ ID NO: 16307 - DNA, 21 bp, Homo sapiens
ccgtgtggccactgtcatgta

SEQ ID NO: 16308 - DNA, 21 bp, Homo sapiens
tgggacagtcattgcagtcta

SEQ ID NO: 16309 - DNA, 21 bp, Homo sapiens
cagccaggccatcgccaacta

SEQ ID NO: 16310 - DNA, 21 bp, Homo sapiens
tgggacaaagaaagagaccaa

SEQ ID NO: 16311 - DNA, 21 bp, Homo sapiens
atggagcaccatttccatgaa

SEQ ID NO: 16312 - DNA, 21 bp, Homo sapiens
caggctagcaacaaaggtgaa

SEQ ID NO: 16313 - DNA, 21 bp, Homo sapiens
caggcctgtgattaagagcaa

SEQ ID NO: 16314 - DNA, 21 bp, Homo sapiens
cccaagtgttgtagccttaaa

SEQ ID NO: 16315 - DNA, 21 bp, Homo sapiens
gcggtccgcattactcacata

SEQ ID NO: 16316 - DNA, 21 bp, Homo sapiens
caccctcttaacgatgatgga

SEQ ID NO: 16317 - DNA, 21 bp, Homo sapiens
cactctatggagccaatctaa

SEQ ID NO: 16318 - DNA, 21 bp, Homo sapiens
cacgattataatggagggcaa

SEQ ID NO: 16319 - DNA, 21 bp, Homo sapiens
ccgccttgtgagccagagcca

SEQ ID NO: 16320 - DNA, 21 bp, Homo sapiens
ccagcggaggtcctcaggaaa

SEQ ID NO: 16321 - DNA, 21 bp, Homo sapiens
ctcctgggcagcggaaacaaa

SEQ ID NO: 16322 - DNA, 21 bp, Homo sapiens
ctcccggaatctggtggacaa

SEQ ID NO: 16323 - DNA, 21 bp, Homo sapiens
tccagtggtctttggagaaca

SEQ ID NO: 16324 - DNA, 21 bp, Homo sapiens
cggctgcaccgcgggcatgaa

SEQ ID NO: 16325 - DNA, 21 bp, Homo sapiens
aaggtgcaccaggtaagatga

SEQ ID NO: 16326 - DNA, 21 bp, Homo sapiens
cagtgggaagaggaatttgaa

SEQ ID NO: 16327 - DNA, 21 bp, Homo sapiens
caggaaggttggagcaagcaa

SEQ ID NO: 16328 - DNA, 21 bp, Homo sapiens
tggaatcttcttgaaagttta

SEQ ID NO: 16329 - DNA, 21 bp, Homo sapiens
cagcgtgaagggcctgaacaa

SEQ ID NO: 16330 - DNA, 21 bp, Homo sapiens
caggtcctgaatgaagctgta

SEQ ID NO: 16331 - DNA, 21 bp, Homo sapiens
cactatgtttataaagagaaa

SEQ ID NO: 16332 - DNA, 21 bp, Homo sapiens
ctgcttggatatgaaacataa

SEQ ID NO: 16333 - DNA, 21 bp, Homo sapiens
aagagcttcgtgttagagaaa

SEQ ID NO: 16334 - DNA, 21 bp, Homo sapiens
aagacaaatgagacagagcta

SEQ ID NO: 16335 - DNA, 21 bp, Homo sapiens
cagggtatcaagagtcagtaa

SEQ ID NO: 16336 - DNA, 21 bp, Homo sapiens
aaggatagaattatccatcta

SEQ ID NO: 16337 - DNA, 21 bp, Homo sapiens
acccaatagcataagtattaa

SEQ ID NO: 16338 - DNA, 21 bp, Homo sapiens
cagcctcagtactgtaagaaa

SEQ ID NO: 16339 - DNA, 21 bp, Homo sapiens
cggtatataaatagaattaaa

SEQ ID NO: 16340 - DNA, 21 bp, Homo sapiens
caggtgtttctgaaagattaa

SEQ ID NO: 16341 - DNA, 21 bp, Homo sapiens
aaccctaagcctaaaccttaa

SEQ ID NO: 16342 - DNA, 21 bp, Homo sapiens
acccttaaccataacccttaa

SEQ ID NO: 16343 - DNA, 21 bp, Homo sapiens
tggcttgaacccagaggtgaa

SEQ ID NO: 16344 - DNA, 21 bp, Homo sapiens
cagagtcacactggatttaca

SEQ ID NO: 16345 - DNA, 21 bp, Homo sapiens
ctcgctcaggtgagcattcaa

SEQ ID NO: 16346 - DNA, 21 bp, Homo sapiens
tagagaggtaattaagttaaa

SEQ ID NO: 16347 - DNA, 21 bp, Homo sapiens
cccatccaggaaggttatata

SEQ ID NO: 16348 - DNA, 21 bp, Homo sapiens
cagggtcaaagttctgagcat

SEQ ID NO: 16349 - DNA, 21 bp, Homo sapiens
aagagacagaatgacaagata

SEQ ID NO: 16350 - DNA, 21 bp, Homo sapiens
ctgaagcaaatgtaccataaa

SEQ ID NO: 16351 - DNA, 21 bp, Homo sapiens
cagcaactcaatgaaagccaa

SEQ ID NO: 16352 - DNA, 21 bp, Homo sapiens
cagagtgtgagtgatacttta

SEQ ID NO: 16353 - DNA, 21 bp, Homo sapiens
aagagacagaatgacaagata

SEQ ID NO: 16354 - DNA, 21 bp, Homo sapiens
ctgaagcaaatgtaccataaa

SEQ ID NO: 16355 - DNA, 21 bp, Homo sapiens
ccggccctgtttctacctcaa

SEQ ID NO: 16356 - DNA, 21 bp, Homo sapiens
cagcaactcaatgaaagccaa

SEQ ID NO: 16357 - DNA, 21 bp, Homo sapiens
ctgagaaatgaaagtgtgaaa

SEQ ID NO: 16358 - DNA, 21 bp, Homo sapiens
atggtgcttcctataatccaa

SEQ ID NO: 16359 - DNA, 21 bp, Homo sapiens
ttggacttgaccctactgtaa

SEQ ID NO: 16360 - DNA, 21 bp, Homo sapiens
aaggagtcttcaggaatcaaa

SEQ ID NO: 16361 - DNA, 21 bp, Homo sapiens
tacatttaatatcccaattaa

SEQ ID NO: 16362 - DNA, 21 bp, Homo sapiens
aaggatgaaatttgacgaata

SEQ ID NO: 16363 - DNA, 21 bp, Homo sapiens
aaggtctgacagaaactttaa

SEQ ID NO: 16364 - DNA, 21 bp, Homo sapiens
caggttcatgtcccaatgaaa

SEQ ID NO: 16365 - DNA, 21 bp, Homo sapiens
caagctgtatgtgaagctaca

SEQ ID NO: 16366 - DNA, 21 bp, Homo sapiens
aaggacaacgccattaagaaa

SEQ ID NO: 16367 - DNA, 21 bp, Homo sapiens
atggagctatgaaatggcaaa

SEQ ID NO: 16368 - DNA, 21 bp, Homo sapiens
aaggatattaccaacaatgga

SEQ ID NO: 16369 - DNA, 21 bp, Homo sapiens
agggtgggtgatgaccttcta

SEQ ID NO: 16370 - DNA, 21 bp, Homo sapiens
aagagctttgaaaccaataaa

SEQ ID NO: 16371 - DNA, 21 bp, Homo sapiens
caggtcaactgtggaatttga

SEQ ID NO: 16372 - DNA, 21 bp, Homo sapiens
caccatttagaggacaatgaa

SEQ ID NO: 16373 - DNA, 21 bp, Homo sapiens
aagagccatcatggtgatcaa

SEQ ID NO: 16374 - DNA, 21 bp, Homo sapiens
acggagcaacgtccagtttaa

SEQ ID NO: 16375 - DNA, 21 bp, Homo sapiens
caggcataactgaaggtgaaa

SEQ ID NO: 16376 - DNA, 21 bp, Homo sapiens
caggcaggagaatcacctaaa

SEQ ID NO: 16377 - DNA, 21 bp, Homo sapiens
cagggtctcaccttacagcaa

SEQ ID NO: 16378 - DNA, 21 bp, Homo sapiens
cacatctagcatggcatataa

SEQ ID NO: 16379 - DNA, 21 bp, Homo sapiens
aaggctttcttaggtgtgaaa

SEQ ID NO: 16380 - DNA, 21 bp, Homo sapiens
ctggttaagttgtgtactaaa

SEQ ID NO: 16381 - DNA, 21 bp, Homo sapiens
ttgcagagtctcaatacccaa

SEQ ID NO: 16382 - DNA, 21 bp, Homo sapiens
tagctataaattatcatatat

SEQ ID NO: 16383 - DNA, 21 bp, Homo sapiens
cagcagcaacaacaacaacta

SEQ ID NO: 16384 - DNA, 21 bp, Homo sapiens
cccgacctacctcctgttcaa

SEQ ID NO: 16385 - DNA, 21 bp, Homo sapiens
aggcacctttctagagattaa

SEQ ID NO: 16386 - DNA, 21 bp, Homo sapiens
cagggtgaagagaatcttcta

SEQ ID NO: 16387 - DNA, 21 bp, Homo sapiens
accaatttaggtgtaatttaa

SEQ ID NO: 16388 - DNA, 21 bp, Homo sapiens
aacgctttgctttatcattaa

SEQ ID NO: 16389 - DNA, 21 bp, Homo sapiens
aacgcaggatattgcatcata

SEQ ID NO: 16390 - DNA, 21 bp, Homo sapiens
ctcgtgggtcttcatacctaa

SEQ ID NO: 16391 - DNA, 21 bp, Homo sapiens
ccagagtgtattgcttataaa

SEQ ID NO: 16392 - DNA, 21 bp, Homo sapiens
accgtgtttggcagacattaa

SEQ ID NO: 16393 - DNA, 21 bp, Homo sapiens
cgcgctctggaagacattgaa

SEQ ID NO: 16394 - DNA, 21 bp, Homo sapiens
cagagtgataatggctaccta

SEQ ID NO: 16395 - DNA, 21 bp, Homo sapiens
cccgcagaatggaggagataa

SEQ ID NO: 16396 - DNA, 21 bp, Homo sapiens
ctggagaaacatcatccttat

SEQ ID NO: 16397 - DNA, 21 bp, Homo sapiens
caggatttcatatatagcaaa

SEQ ID NO: 16398 - DNA, 21 bp, Homo sapiens
caggagaatgtcagcagtgaa

SEQ ID NO: 16399 - DNA, 21 bp, Homo sapiens
ctggagtaactattccactaa

SEQ ID NO: 16400 - DNA, 21 bp, Homo sapiens
ctgagtcttctctttcttcaa

SEQ ID NO: 16401 - DNA, 21 bp, Homo sapiens
ctgcgacatttagtcctttaa

SEQ ID NO: 16402 - DNA, 21 bp, Homo sapiens
accagtgtgtttgagcattaa

SEQ ID NO: 16403 - DNA, 21 bp, Homo sapiens
cagggtctgaactaagagcaa

SEQ ID NO: 16404 - DNA, 21 bp, Homo sapiens
ctgggtctgcgtgaagataaa

SEQ ID NO: 16405 - DNA, 21 bp, Homo sapiens
cacatcttccatatactttaa

SEQ ID NO: 16406 - DNA, 21 bp, Homo sapiens
ccagagtttcttatcaagtaa

SEQ ID NO: 16407 - DNA, 21 bp, Homo sapiens
caggctgaatttgacgttaat

SEQ ID NO: 16408 - DNA, 21 bp, Homo sapiens
aaggacatacatgcaaatgaa

SEQ ID NO: 16409 - DNA, 21 bp, Homo sapiens
tccgcgagtcctcaaatgtaa

SEQ ID NO: 16410 - DNA, 21 bp, Homo sapiens
cagggcattgtctgtctacaa

SEQ ID NO: 16411 - DNA, 21 bp, Homo sapiens
ctggtgatttccagtaggtga

SEQ ID NO: 16412 - DNA, 21 bp, Homo sapiens
cgcccactaattctacattat

SEQ ID NO: 16413 - DNA, 21 bp, Homo sapiens
cacacccattccacatgcaaa

SEQ ID NO: 16414 - DNA, 21 bp, Homo sapiens
cgccctgatgctgcccgtgaa

SEQ ID NO: 16415 - DNA, 21 bp, Homo sapiens
ttcgaaagtgctgcagttata

SEQ ID NO: 16416 - DNA, 21 bp, Homo sapiens
ctgtctgtgctcaagaataaa

SEQ ID NO: 16417 - DNA, 21 bp, Homo sapiens
cccggaaggaaaggaaaggaa

SEQ ID NO: 16418 - DNA, 21 bp, Homo sapiens
ctggactttggtcaagtacta

SEQ ID NO: 16419 - DNA, 21 bp, Homo sapiens
gaccctatatttggaatttaa

SEQ ID NO: 16420 - DNA, 21 bp, Homo sapiens
tagattaaattggctaattaa

SEQ ID NO: 16421 - DNA, 21 bp, Homo sapiens
ccactgtttatttcagcataa

SEQ ID NO: 16422 - DNA, 21 bp, Homo sapiens
cacgaaatcctcccatctcaa

SEQ ID NO: 16423 - DNA, 21 bp, Homo sapiens
tagagtaatactggccttata

SEQ ID NO: 16424 - DNA, 21 bp, Homo sapiens
ctgcttgtggtggaaacataa

SEQ ID NO: 16425 - DNA, 21 bp, Homo sapiens
ctccgtgtggcctccctggaa

SEQ ID NO: 16426 - DNA, 21 bp, Homo sapiens
aagggcagcattgggcatgga

SEQ ID NO: 16427 - DNA, 21 bp, Homo sapiens
cacactggtcacaccacctta

SEQ ID NO: 16428 - DNA, 21 bp, Homo sapiens
gtgggaaatcatttagttcaa

SEQ ID NO: 16429 - DNA, 21 bp, Homo sapiens
cggctcctgtctgaccaggaa

SEQ ID NO: 16430 - DNA, 21 bp, Homo sapiens
atgatgtactagatcccttaa

SEQ ID NO: 16431 - DNA, 21 bp, Homo sapiens
cagggagcagaagacattaat

SEQ ID NO: 16432 - DNA, 21 bp, Homo sapiens
aagggctatgaagaaacatat

SEQ ID NO: 16433 - DNA, 21 bp, Homo sapiens
caggagctcctgctacataaa

SEQ ID NO: 16434 - DNA, 21 bp, Homo sapiens
aaggaacatatttccacataa

SEQ ID NO: 16435 - DNA, 21 bp, Homo sapiens
aaggtacaaattacagatata

SEQ ID NO: 16436 - DNA, 21 bp, Homo sapiens
aaggaaatgatttaacttcaa

SEQ ID NO: 16437 - DNA, 21 bp, Homo sapiens
cccatgaagaatgaagcacaa

SEQ ID NO: 16438 - DNA, 21 bp, Homo sapiens
ccgagcgatcgcagagaccta

SEQ ID NO: 16439 - DNA, 21 bp, Homo sapiens
ttcatacagaatggcactaaa

SEQ ID NO: 16440 - DNA, 21 bp, Homo sapiens
ctgggattattgattacaaca

SEQ ID NO: 16441 - DNA, 21 bp, Homo sapiens
cacgtactttctgaatctaaa

SEQ ID NO: 16442 - DNA, 21 bp, Homo sapiens
cacaaagatgtgagcaataaa

SEQ ID NO: 16443 - DNA, 21 bp, Homo sapiens
cccggcgttcctggaagccaa

SEQ ID NO: 16444 - DNA, 21 bp, Homo sapiens
cccgcagcaagttaaatctaa

SEQ ID NO: 16445 - DNA, 21 bp, Homo sapiens
aaggcaaaccatagccattaa

SEQ ID NO: 16446 - DNA, 21 bp, Homo sapiens
aagaatttgcatcataattaa

SEQ ID NO: 16447 - DNA, 21 bp, Homo sapiens
cagctcggacagcatccataa

SEQ ID NO: 16448 - DNA, 21 bp, Homo sapiens
ctgtctgaaattgaatgttta

SEQ ID NO: 16449 - DNA, 21 bp, Homo sapiens
caggcatcaccttgcctggaa

SEQ ID NO: 16450 - DNA, 21 bp, Homo sapiens
ccggtgattgatgatactaca

SEQ ID NO: 16451 - DNA, 21 bp, Homo sapiens
aaccagaataatcagccctaa

SEQ ID NO: 16452 - DNA, 21 bp, Homo sapiens
acgcagagatgcacacattaa

SEQ ID NO: 16453 - DNA, 21 bp, Homo sapiens
cccagatagctgggattggaa

SEQ ID NO: 16454 - DNA, 21 bp, Homo sapiens
cacagataacccaagacacaa

SEQ ID NO: 16455 - DNA, 21 bp, Homo sapiens
ctggctgacgtgctccatcca

SEQ ID NO: 16456 - DNA, 21 bp, Homo sapiens
cattgtggacttggacattta

SEQ ID NO: 16457 - DNA, 21 bp, Homo sapiens
ctgacactaagctcggcttca

SEQ ID NO: 16458 - DNA, 21 bp, Homo sapiens
gccctctactcagcatggata

SEQ ID NO: 16459 - DNA, 21 bp, Homo sapiens
ctgggtaagtctagcccagaa

SEQ ID NO: 16460 - DNA, 21 bp, Homo sapiens
caggtgatgcctgaagctcaa

SEQ ID NO: 16461 - DNA, 21 bp, Homo sapiens
atgcattcgtttatcaatcaa

SEQ ID NO: 16462 - DNA, 21 bp, Homo sapiens
ccgggaagtgttcacaaatat

SEQ ID NO: 16463 - DNA, 21 bp, Homo sapiens
aagaaggaaactggacacata

SEQ ID NO: 16464 - DNA, 21 bp, Homo sapiens
caggacaattattaagttcca

SEQ ID NO: 16465 - DNA, 21 bp, Homo sapiens
caggatctacgttataattat

SEQ ID NO: 16466 - DNA, 21 bp, Homo sapiens
cacaattatgaaataatgtaa

SEQ ID NO: 16467 - DNA, 21 bp, Homo sapiens
caccaactccttgtattgcaa

SEQ ID NO: 16468 - DNA, 21 bp, Homo sapiens
ctgggatggaatcctaatgaa

SEQ ID NO: 16469 - DNA, 21 bp, Homo sapiens
caggtttataatatgcattca

SEQ ID NO: 16470 - DNA, 21 bp, Homo sapiens
cagcaatttaataataatgca

SEQ ID NO: 16471 - DNA, 21 bp, Homo sapiens
ctgggattacacagtcggtaa

SEQ ID NO: 16472 - DNA, 21 bp, Homo sapiens
caggttaatggaaataattaa

SEQ ID NO: 16473 - DNA, 21 bp, Homo sapiens
atggagatatacaattgttaa

SEQ ID NO: 16474 - DNA, 21 bp, Homo sapiens
aaggtcttaatgagaatgaaa

SEQ ID NO: 16475 - DNA, 21 bp, Homo sapiens
cccatcctgagtgactactaa

SEQ ID NO: 16476 - DNA, 21 bp, Homo sapiens
ccagcatgtctttccactata

SEQ ID NO: 16477 - DNA, 21 bp, Homo sapiens
ccaccggagactcaagatgaa

SEQ ID NO: 16478 - DNA, 21 bp, Homo sapiens
cacactcacagttaccagcta

SEQ ID NO: 16479 - DNA, 21 bp, Homo sapiens
ccagtgcagctagaaatgtaa

SEQ ID NO: 16480 - DNA, 21 bp, Homo sapiens
tccctcagaatttacatctaa

SEQ ID NO: 16481 - DNA, 21 bp, Homo sapiens
ttagataataatggaactgaa

SEQ ID NO: 16482 - DNA, 21 bp, Homo sapiens
cccagtttagtttatatataa

SEQ ID NO: 16483 - DNA, 21 bp, Homo sapiens
ttggctggacacaatcctgaa

SEQ ID NO: 16484 - DNA, 21 bp, Homo sapiens
caggttgaccttggtgaacta

SEQ ID NO: 16485 - DNA, 21 bp, Homo sapiens
taggactctggagaagatcaa

SEQ ID NO: 16486 - DNA, 21 bp, Homo sapiens
tggaagctctttggaaaccaa

SEQ ID NO: 16487 - DNA, 21 bp, Homo sapiens
aagaatacataagaagtcaaa

SEQ ID NO: 16488 - DNA, 21 bp, Homo sapiens
tacaatatattcttaatttga

SEQ ID NO: 16489 - DNA, 21 bp, Homo sapiens
tacattctgagttgaaggaaa

SEQ ID NO: 16490 - DNA, 21 bp, Homo sapiens
tccaagtatgattggaaatta

SEQ ID NO: 16491 - DNA, 21 bp, Homo sapiens
tagatatttattatccaggta

SEQ ID NO: 16492 - DNA, 21 bp, Homo sapiens
acgaaattcattggcagatta

SEQ ID NO: 16493 - DNA, 21 bp, Homo sapiens
ctgcgtggtggcagttgttga

SEQ ID NO: 16494 - DNA, 21 bp, Homo sapiens
cgggtttgtagttacctataa

SEQ ID NO: 16495 - DNA, 21 bp, Homo sapiens
aagcaggtatttgtattagaa

SEQ ID NO: 16496 - DNA, 21 bp, Homo sapiens
ctgatagaagaagacattaaa

SEQ ID NO: 16497 - DNA, 21 bp, Homo sapiens
aacaagtacgaatttgccaaa

SEQ ID NO: 16498 - DNA, 21 bp, Homo sapiens
ctccttgtgtttcattggcta

SEQ ID NO: 16499 - DNA, 21 bp, Homo sapiens
acgaatttgccaaatggacaa

SEQ ID NO: 16500 - DNA, 21 bp, Homo sapiens
acggtctatggtggcacaaga

SEQ ID NO: 16501 - DNA, 21 bp, Homo sapiens
cacgttccagatacactttaa

SEQ ID NO: 16502 - DNA, 21 bp, Homo sapiens
ttggatttctatcaccataaa

SEQ ID NO: 16503 - DNA, 21 bp, Homo sapiens
cgccaactgcctcagacctta

SEQ ID NO: 16504 - DNA, 21 bp, Homo sapiens
gcgggctgcctctgacattta

SEQ ID NO: 16505 - DNA, 21 bp, Homo sapiens
aacgatctgcgatgaagataa

SEQ ID NO: 16506 - DNA, 21 bp, Homo sapiens
cagctgtgacttgataaacaa

SEQ ID NO: 16507 - DNA, 21 bp, Homo sapiens
caggacctctgaatcctataa

SEQ ID NO: 16508 - DNA, 21 bp, Homo sapiens
atgtagtaatatactcaataa

SEQ ID NO: 16509 - DNA, 21 bp, Homo sapiens
ctgactttactctgagatcaa

SEQ ID NO: 16510 - DNA, 21 bp, Homo sapiens
aaaggtaatgaccaagataaa

SEQ ID NO: 16511 - DNA, 21 bp, Homo sapiens
taggaagtaattactaataat

SEQ ID NO: 16512 - DNA, 21 bp, Homo sapiens
aaccatgtagctcataagtaa

SEQ ID NO: 16513 - DNA, 21 bp, Homo sapiens
ccgggacaacaggctctccaa

SEQ ID NO: 16514 - DNA, 21 bp, Homo sapiens
ctggctgtagatcccaatgaa

SEQ ID NO: 16515 - DNA, 21 bp, Homo sapiens
tagggttaatgctacatggaa

SEQ ID NO: 16516 - DNA, 21 bp, Homo sapiens
aaggcaaattctatcttcaaa

SEQ ID NO: 16517 - DNA, 21 bp, Homo sapiens
caggctttgcttctctcccaa

SEQ ID NO: 16518 - DNA, 21 bp, Homo sapiens
aggaaccttactgataattta

SEQ ID NO: 16519 - DNA, 21 bp, Homo sapiens
aaccaagagttataaactata

SEQ ID NO: 16520 - DNA, 21 bp, Homo sapiens
aacgtaaatattattacgtta

SEQ ID NO: 16521 - DNA, 21 bp, Homo sapiens
cacgtcctccttactcccgaa

SEQ ID NO: 16522 - DNA, 21 bp, Homo sapiens
cagaaactaaaccgacaccaa

SEQ ID NO: 16523 - DNA, 21 bp, Homo sapiens
aaccagctgtacatttggaaa

SEQ ID NO: 16524 - DNA, 21 bp, Homo sapiens
gacgagaagaaggacgctgga

SEQ ID NO: 16525 - DNA, 21 bp, Homo sapiens
aagggagagacagacaataaa

SEQ ID NO: 16526 - DNA, 21 bp, Homo sapiens
aagatacaacttaactttaaa

SEQ ID NO: 16527 - DNA, 21 bp, Homo sapiens
ccggtccactgtggaaggcaa

SEQ ID NO: 16528 - DNA, 21 bp, Homo sapiens
cagccagaatctcgcatgtaa

SEQ ID NO: 16529 - DNA, 21 bp, Homo sapiens
aagctcaggctgtgaaattaa

SEQ ID NO: 16530 - DNA, 21 bp, Homo sapiens
aacgataatttgtgaaagtaa

SEQ ID NO: 16531 - DNA, 21 bp, Homo sapiens
aagagattgctttgtcctgaa

SEQ ID NO: 16532 - DNA, 21 bp, Homo sapiens
cacgatgtctattaaacagat

SEQ ID NO: 16533 - DNA, 21 bp, Homo sapiens
aagaaattaggtgaagaatta

SEQ ID NO: 16534 - DNA, 21 bp, Homo sapiens
aacaatcactatagtaagata

SEQ ID NO: 16535 - DNA, 21 bp, Homo sapiens
ctggttgaccttgcaaattga

SEQ ID NO: 16536 - DNA, 21 bp, Homo sapiens
aagcagatgcttgtaagctaa

SEQ ID NO: 16537 - DNA, 21 bp, Homo sapiens
atcaatctatattatcttaaa

SEQ ID NO: 16538 - DNA, 21 bp, Homo sapiens
aaggttagttgagtaaattaa

SEQ ID NO: 16539 - DNA, 21 bp, Homo sapiens
ccaaatgggactgaactttaa

SEQ ID NO: 16540 - DNA, 21 bp, Homo sapiens
caggagaaccatcacaagcta

SEQ ID NO: 16541 - DNA, 21 bp, Homo sapiens
atgcctgaagtatggcatgta

SEQ ID NO: 16542 - DNA, 21 bp, Homo sapiens
aagtgatgtcattaagcagaa

SEQ ID NO: 16543 - DNA, 21 bp, Homo sapiens
cccatttcatctagaaagtaa

SEQ ID NO: 16544 - DNA, 21 bp, Homo sapiens
tagaggtttgttaatctaata

SEQ ID NO: 16545 - DNA, 21 bp, Homo sapiens
cagctaggtaagatcatgtaa

SEQ ID NO: 16546 - DNA, 21 bp, Homo sapiens
gaccatgatactaacaataaa

SEQ ID NO: 16547 - DNA, 21 bp, Homo sapiens
tgcccagtttgaagaattgaa

SEQ ID NO: 16548 - DNA, 21 bp, Homo sapiens
atcctctattgttctgacaaa

SEQ ID NO: 16549 - DNA, 21 bp, Homo sapiens
aacgtttaacacagacattaa

SEQ ID NO: 16550 - DNA, 21 bp, Homo sapiens
aacctaatagtcttagccaaa

SEQ ID NO: 16551 - DNA, 21 bp, Homo sapiens
ctggaattctacagccatgat

SEQ ID NO: 16552 - DNA, 21 bp, Homo sapiens
ctgctgggagaaagaatggaa

SEQ ID NO: 16553 - DNA, 21 bp, Homo sapiens
atgactttgatttctgcataa

SEQ ID NO: 16554 - DNA, 21 bp, Homo sapiens
cagggaattattcacatggca

SEQ ID NO: 16555 - DNA, 21 bp, Homo sapiens
aagggcaaggccattaagaaa

SEQ ID NO: 16556 - DNA, 21 bp, Homo sapiens
ccgccaccacgcgcagcctat

SEQ ID NO: 16557 - DNA, 21 bp, Homo sapiens
agggtatttcctagcaagaaa

SEQ ID NO: 16558 - DNA, 21 bp, Homo sapiens
taggaagaatttcctgacaaa

SEQ ID NO: 16559 - DNA, 21 bp, Homo sapiens
aagcaatttgctcaagataat

SEQ ID NO: 16560 - DNA, 21 bp, Homo sapiens
acccatcaagagattaagtaa

SEQ ID NO: 16561 - DNA, 21 bp, Homo sapiens
caggatgctgtcacaattaca

SEQ ID NO: 16562 - DNA, 21 bp, Homo sapiens
tcaggagtaattgttaactaa

SEQ ID NO: 16563 - DNA, 21 bp, Homo sapiens
cagctttgaggtcctaggaaa

SEQ ID NO: 16564 - DNA, 21 bp, Homo sapiens
cagagtttccttcccagctaa

SEQ ID NO: 16565 - DNA, 21 bp, Homo sapiens
taccaggaaacttgagaccaa

SEQ ID NO: 16566 - DNA, 21 bp, Homo sapiens
cacacccttaccagacttcaa

SEQ ID NO: 16567 - DNA, 21 bp, Homo sapiens
cacaacaacagtataacataa

SEQ ID NO: 16568 - DNA, 21 bp, Homo sapiens
ttcaataaagttatcaataaa

SEQ ID NO: 16569 - DNA, 21 bp, Homo sapiens
aacgggaaagctcttggaaca

SEQ ID NO: 16570 - DNA, 21 bp, Homo sapiens
ttgagccagtttacaaagaaa

SEQ ID NO: 16571 - DNA, 21 bp, Homo sapiens
ctcaaaggctgtccacaagaa

SEQ ID NO: 16572 - DNA, 21 bp, Homo sapiens
aaccctgtctgtctctactaa

SEQ ID NO: 16573 - DNA, 21 bp, Homo sapiens
ccagatgaaacagtacatcta

SEQ ID NO: 16574 - DNA, 21 bp, Homo sapiens
cacctacatcacaaatctgaa

SEQ ID NO: 16575 - DNA, 21 bp, Homo sapiens
cacggaggcatcttatgttaa

SEQ ID NO: 16576 - DNA, 21 bp, Homo sapiens
cagactggtttgaaggaagaa

SEQ ID NO: 16577 - DNA, 21 bp, Homo sapiens
aagacgtaatagagatttcaa

SEQ ID NO: 16578 - DNA, 21 bp, Homo sapiens
ctcgtagtcagtgacaagtaa

SEQ ID NO: 16579 - DNA, 21 bp, Homo sapiens
aagaagaatcctaacctcaaa

SEQ ID NO: 16580 - DNA, 21 bp, Homo sapiens
aagggtcgtggtgagaatcaa

SEQ ID NO: 16581 - DNA, 21 bp, Homo sapiens
accaagtactccagattaata

SEQ ID NO: 16582 - DNA, 21 bp, Homo sapiens
cagcttgaactgttgccttaa

SEQ ID NO: 16583 - DNA, 21 bp, Homo sapiens
attgatcagccagcagtcaaa

SEQ ID NO: 16584 - DNA, 21 bp, Homo sapiens
cactcgccaattagagattga

SEQ ID NO: 16585 - DNA, 21 bp, Homo sapiens
ctgcaaggcgtgccacctgaa

SEQ ID NO: 16586 - DNA, 21 bp, Homo sapiens
ccggtgctcctgccttgtgaa

SEQ ID NO: 16587 - DNA, 21 bp, Homo sapiens
ctactggatgatgacaatgaa

SEQ ID NO: 16588 - DNA, 21 bp, Homo sapiens
aagcagtagatatgaataata

SEQ ID NO: 16589 - DNA, 21 bp, Homo sapiens
tgccaatatggtcaacaggaa

SEQ ID NO: 16590 - DNA, 21 bp, Homo sapiens
tcacaagaccttcaatttaaa

SEQ ID NO: 16591 - DNA, 21 bp, Homo sapiens
ctggcctacaagaacacataa

SEQ ID NO: 16592 - DNA, 21 bp, Homo sapiens
aaagtgggtcaccaaatgcta

SEQ ID NO: 16593 - DNA, 21 bp, Homo sapiens
ccaggccgctttggaagcgaa

SEQ ID NO: 16594 - DNA, 21 bp, Homo sapiens
ccctcgagagttggaagtcaa

SEQ ID NO: 16595 - DNA, 21 bp, Homo sapiens
catggtatcaagggaaatata

SEQ ID NO: 16596 - DNA, 21 bp, Homo sapiens
cccacttgaattgctcaacaa

SEQ ID NO: 16597 - DNA, 21 bp, Homo sapiens
ctgctcgtaatggatcaacaa

SEQ ID NO: 16598 - DNA, 21 bp, Homo sapiens
cagatttaactgcaatagata

SEQ ID NO: 16599 - DNA, 21 bp, Homo sapiens
aacagaccttccgcaacttca

SEQ ID NO: 16600 - DNA, 21 bp, Homo sapiens
cagcaagacggcagaggtaca

SEQ ID NO: 16601 - DNA, 21 bp, Homo sapiens
accaagttcaatgctgatgaa

SEQ ID NO: 16602 - DNA, 21 bp, Homo sapiens
acgctcggaagggttgacatt

SEQ ID NO: 16603 - DNA, 21 bp, Homo sapiens
caggtcttcggtggcaagaaa

SEQ ID NO: 16604 - DNA, 21 bp, Homo sapiens
cccggtcactacactatgaaa

SEQ ID NO: 16605 - DNA, 21 bp, Homo sapiens
tgggaggacgagaagagccaa

SEQ ID NO: 16606 - DNA, 21 bp, Homo sapiens
aagcccttggagaatgaacta

SEQ ID NO: 16607 - DNA, 21 bp, Homo sapiens
accggatatgcagctctgaaa

SEQ ID NO: 16608 - DNA, 21 bp, Homo sapiens
ccggagaaatctgcaggtaaa

SEQ ID NO: 16609 - DNA, 21 bp, Homo sapiens
ctgagtgacgttaatcactca

SEQ ID NO: 16610 - DNA, 21 bp, Homo sapiens
cgggaagctgctggtgatcaa

SEQ ID NO: 16611 - DNA, 21 bp, Homo sapiens
cacaatattggtggtatcaat

SEQ ID NO: 16612 - DNA, 21 bp, Homo sapiens
taccatcaacttgtccaacta

SEQ ID NO: 16613 - DNA, 21 bp, Homo sapiens
cacggtgctctggaccgtctt

SEQ ID NO: 16614 - DNA, 21 bp, Homo sapiens
cctcatcaacattgactttca

SEQ ID NO: 16615 - DNA, 21 bp, Homo sapiens
ctggagaatgacagccacaca

SEQ ID NO: 16616 - DNA, 21 bp, Homo sapiens
cacggaggtgagagagagcaa

SEQ ID NO: 16617 - DNA, 21 bp, Homo sapiens
ctgggcctgcctggaccataa

SEQ ID NO: 16618 - DNA, 21 bp, Homo sapiens
aaggatgagagggaagcagaa

SEQ ID NO: 16619 - DNA, 21 bp, Homo sapiens
cagacgctgaggattcttgta

SEQ ID NO: 16620 - DNA, 21 bp, Homo sapiens
cccgaaagatgtgggcattaa

SEQ ID NO: 16621 - DNA, 21 bp, Homo sapiens
ccaggattgaaggaagggaaa

SEQ ID NO: 16622 - DNA, 21 bp, Homo sapiens
caggagtttgctagtgggaca

SEQ ID NO: 16623 - DNA, 21 bp, Homo sapiens
aagaagctccgcaacaagata

SEQ ID NO: 16624 - DNA, 21 bp, Homo sapiens
cacgcatctgatgaaatggat

SEQ ID NO: 16625 - DNA, 21 bp, Homo sapiens
ctggtacttcttatgacacta

SEQ ID NO: 16626 - DNA, 21 bp, Homo sapiens
aacatggtctataatgtgtaa

SEQ ID NO: 16627 - DNA, 21 bp, Homo sapiens
ccgggcatctgcattccggaa

SEQ ID NO: 16628 - DNA, 21 bp, Homo sapiens
cagaaggaagagaaagtgcta

SEQ ID NO: 16629 - DNA, 21 bp, Homo sapiens
tgccatggaaatggtccaata

SEQ ID NO: 16630 - DNA, 21 bp, Homo sapiens
caggtttaaccaccagtttaa

SEQ ID NO: 16631 - DNA, 21 bp, Homo sapiens
ctgtctcaggagattctcaaa

SEQ ID NO: 16632 - DNA, 21 bp, Homo sapiens
cacccaagagattatcctgaa

SEQ ID NO: 16633 - DNA, 21 bp, Homo sapiens
aagcctgagcccatggagaaa

SEQ ID NO: 16634 - DNA, 21 bp, Homo sapiens
acggttatgtatgtagcaaga

SEQ ID NO: 16635 - DNA, 21 bp, Homo sapiens
gacaagaaactagagcaataa

SEQ ID NO: 16636 - DNA, 21 bp, Homo sapiens
ccagcatgtggaattcttgaa

SEQ ID NO: 16637 - DNA, 21 bp, Homo sapiens
ctccttgtggcccacagccca

SEQ ID NO: 16638 - DNA, 21 bp, Homo sapiens
aagccattcctcatgccagaa

SEQ ID NO: 16639 - DNA, 21 bp, Homo sapiens
ccgctgcagcccaagcattta

SEQ ID NO: 16640 - DNA, 21 bp, Homo sapiens
ctgcagaagaatcatgttcta

SEQ ID NO: 16641 - DNA, 21 bp, Homo sapiens
tgccatggctggaatagccaa

SEQ ID NO: 16642 - DNA, 21 bp, Homo sapiens
ccgctgcagcccaagcattta

SEQ ID NO: 16643 - DNA, 21 bp, Homo sapiens
tcgcctcagatctgaccagaa

SEQ ID NO: 16644 - DNA, 21 bp, Homo sapiens
tcagagtgtttcaaatgtgta

SEQ ID NO: 16645 - DNA, 21 bp, Homo sapiens
gaactacgataagttctcata

SEQ ID NO: 16646 - DNA, 21 bp, Homo sapiens
gagaactacgataagttctca

SEQ ID NO: 16647 - DNA, 21 bp, Homo sapiens
acgggacggctgcccaatgaa

SEQ ID NO: 16648 - DNA, 21 bp, Homo sapiens
cgcggataatcgagactgcaa

SEQ ID NO: 16649 - DNA, 21 bp, Homo sapiens
caggcacatgctcctgcttca

SEQ ID NO: 16650 - DNA, 21 bp, Homo sapiens
cccaagcattcccgacaggaa

SEQ ID NO: 16651 - DNA, 21 bp, Homo sapiens
cagatgtgcattggagactct

SEQ ID NO: 16652 - DNA, 21 bp, Homo sapiens
gacgtgggcattggagactga

SEQ ID NO: 16653 - DNA, 21 bp, Homo sapiens
tctggaagtatgtatctacca

SEQ ID NO: 16654 - DNA, 21 bp, Homo sapiens
caggatttgatggtgctagta

SEQ ID NO: 16655 - DNA, 21 bp, Homo sapiens
ctcattgacaagattaacata

SEQ ID NO: 16656 - DNA, 21 bp, Homo sapiens
aacgtttaacacagacattaa

SEQ ID NO: 16657 - DNA, 21 bp, Homo sapiens
cagagctggatctaccatgaa

SEQ ID NO: 16658 - DNA, 21 bp, Homo sapiens
aaagatgactgaagaatggca

SEQ ID NO: 16659 - DNA, 21 bp, Homo sapiens
cgccgaggatttcagaagata

SEQ ID NO: 16660 - DNA, 21 bp, Homo sapiens
caggagggttggacacggcaa

SEQ ID NO: 16661 - DNA, 21 bp, Homo sapiens
aagggcatacatggtaattat

SEQ ID NO: 16662 - DNA, 21 bp, Homo sapiens
aacgtgctaagtatcagtaaa

SEQ ID NO: 16663 - DNA, 21 bp, Homo sapiens
cggagaaagactggtcttgaa

SEQ ID NO: 16664 - DNA, 21 bp, Homo sapiens
cagacttggtgttatggtaaa

SEQ ID NO: 16665 - DNA, 21 bp, Homo sapiens
gccgggaggttgagtagagaa

SEQ ID NO: 16666 - DNA, 21 bp, Homo sapiens
cagaaggagtggagacattga

SEQ ID NO: 16667 - DNA, 21 bp, Homo sapiens
caggaattccttatgtgtgaa

SEQ ID NO: 16668 - DNA, 21 bp, Homo sapiens
acggtactgaacagacaatta

SEQ ID NO: 16669 - DNA, 21 bp, Homo sapiens
accaatgtttacaaatatgta

SEQ ID NO: 16670 - DNA, 21 bp, Homo sapiens
caccatgaaatatgtcttcta

SEQ ID NO: 16671 - DNA, 21 bp, Homo sapiens
cagaaggtggagaggtcatca

SEQ ID NO: 16672 - DNA, 21 bp, Homo sapiens
ccggcgatgctgcgttgccaa

SEQ ID NO: 16673 - DNA, 21 bp, Homo sapiens
aagacatgagggaatcattaa

SEQ ID NO: 16674 - DNA, 21 bp, Homo sapiens
acagctggatataaacctgaa

SEQ ID NO: 16675 - DNA, 21 bp, Homo sapiens
cagaagaagtcttgtcatcaa

SEQ ID NO: 16676 - DNA, 21 bp, Homo sapiens
ttccaggttattgataagaaa

SEQ ID NO: 16677 - DNA, 21 bp, Homo sapiens
aggcaccactctgaagacaaa

SEQ ID NO: 16678 - DNA, 21 bp, Homo sapiens
caggtggtgtctatgatgcaa

SEQ ID NO: 16679 - DNA, 21 bp, Homo sapiens
aacactggttatgggaacaaa

SEQ ID NO: 16680 - DNA, 21 bp, Homo sapiens
cagggtttggagaacattcaa

SEQ ID NO: 16681 - DNA, 21 bp, Homo sapiens
cccgtgattatgggcctccaa

SEQ ID NO: 16682 - DNA, 21 bp, Homo sapiens
ctcctacacactcatccttaa

SEQ ID NO: 16683 - DNA, 21 bp, Homo sapiens
aagggaaacaagagcataaat

SEQ ID NO: 16684 - DNA, 21 bp, Homo sapiens
cagcctgatgatgcagtagaa

SEQ ID NO: 16685 - DNA, 21 bp, Homo sapiens
cccagatgatggagaaatcga

SEQ ID NO: 16686 - DNA, 21 bp, Homo sapiens
ccgcagtgagcccaccaagaa

SEQ ID NO: 16687 - DNA, 21 bp, Homo sapiens
aagaaacgactctcattgaaa

SEQ ID NO: 16688 - DNA, 21 bp, Homo sapiens
ctccaagttgccaaacttaat

SEQ ID NO: 16689 - DNA, 21 bp, Homo sapiens
cagaagcaactttctgaagaa

SEQ ID NO: 16690 - DNA, 21 bp, Homo sapiens
caggaagaaattgtcatgcta

SEQ ID NO: 16691 - DNA, 21 bp, Homo sapiens
cagggagatcagcatctgcat

SEQ ID NO: 16692 - DNA, 21 bp, Homo sapiens
cagcccgtggtcgacagggaa

SEQ ID NO: 16693 - DNA, 21 bp, Homo sapiens
ctgctggactatattgtgaaa

SEQ ID NO: 16694 - DNA, 21 bp, Homo sapiens
ttccaggagtttgtcaataaa

SEQ ID NO: 16695 - DNA, 21 bp, Homo sapiens
aaacaagataatattaaataa

SEQ ID NO: 16696 - DNA, 21 bp, Homo sapiens
cagccttatattactccataa

SEQ ID NO: 16697 - DNA, 21 bp, Homo sapiens
aacctcatcttcagatactta

SEQ ID NO: 16698 - DNA, 21 bp, Homo sapiens
ttgcaagtgtgctctttgtga

SEQ ID NO: 16699 - DNA, 21 bp, Homo sapiens
ccgcgacaaggcgctgctcaa

SEQ ID NO: 16700 - DNA, 21 bp, Homo sapiens
caccattgtctcagcagtaaa

SEQ ID NO: 16701 - DNA, 21 bp, Homo sapiens
caccgcgacattaaggacgaa

SEQ ID NO: 16702 - DNA, 21 bp, Homo sapiens
gagcgtttaatttattcagta

SEQ ID NO: 16703 - DNA, 21 bp, Homo sapiens
ctgtcagaagatgaacatgta

SEQ ID NO: 16704 - DNA, 21 bp, Homo sapiens
atgaacatgtatagtggctaa

SEQ ID NO: 16705 - DNA, 21 bp, Homo sapiens
tgggtattaattctcactgta

SEQ ID NO: 16706 - DNA, 21 bp, Homo sapiens
ctgtataagtgaagacattaa

SEQ ID NO: 16707 - DNA, 21 bp, Homo sapiens
aaccagcagaacaaatacaaa

SEQ ID NO: 16708 - DNA, 21 bp, Homo sapiens
ttcttactttgatgggaacaa

SEQ ID NO: 16709 - DNA, 21 bp, Homo sapiens
atgctgaaacatcgaagtcca

SEQ ID NO: 16710 - DNA, 21 bp, Homo sapiens
ccgagaaatcaacgacctata

SEQ ID NO: 16711 - DNA, 21 bp, Homo sapiens
tacccttaccatcaatgccaa

SEQ ID NO: 16712 - DNA, 21 bp, Homo sapiens
ccgggagacagccagactcaa

SEQ ID NO: 16713 - DNA, 21 bp, Homo sapiens
caccaagactatcaatttgat

SEQ ID NO: 16714 - DNA, 21 bp, Homo sapiens
agggaaattcatctatttata

SEQ ID NO: 16715 - DNA, 21 bp, Homo sapiens
aagatgcaggatcatggccaa

SEQ ID NO: 16716 - DNA, 21 bp, Homo sapiens
taggtattcaatagcattaga

SEQ ID NO: 16717 - DNA, 21 bp, Homo sapiens
cagaatcagatgttccagctt

SEQ ID NO: 16718 - DNA, 21 bp, Homo sapiens
acgggcttattgagaccctca

SEQ ID NO: 16719 - DNA, 21 bp, Homo sapiens
aaagcgatacattgtctatta

SEQ ID NO: 16720 - DNA, 21 bp, Homo sapiens
aaagataagaagaagaagtaa

SEQ ID NO: 16721 - DNA, 21 bp, Homo sapiens
caatgtctttcttgtattaaa

SEQ ID NO: 16722 - DNA, 21 bp, Homo sapiens
tacagataggattacactaaa

SEQ ID NO: 16723 - DNA, 21 bp, Homo sapiens
ccggctgctcgtcaccgcgaa

SEQ ID NO: 16724 - DNA, 21 bp, Homo sapiens
gacaatttacttgactggaaa

SEQ ID NO: 16725 - DNA, 21 bp, Homo sapiens
atggtatttctggttattaaa

SEQ ID NO: 16726 - DNA, 21 bp, Homo sapiens
ccggagtggttctgactttaa

SEQ ID NO: 16727 - DNA, 21 bp, Homo sapiens
ctctcatgtctgtaaatcaaa

SEQ ID NO: 16728 - DNA, 21 bp, Homo sapiens
aatgaatttccttgcaataaa

SEQ ID NO: 16729 - DNA, 21 bp, Homo sapiens
atagtagattctatcaatcaa

SEQ ID NO: 16730 - DNA, 21 bp, Homo sapiens
caggtgaacagaagttctcaa

SEQ ID NO: 16731 - DNA, 21 bp, Homo sapiens
agggtccattcctcactataa

SEQ ID NO: 16732 - DNA, 21 bp, Homo sapiens
aggagagtccaccctaattaa

SEQ ID NO: 16733 - DNA, 21 bp, Homo sapiens
caagattcaggttcacccgta

SEQ ID NO: 16734 - DNA, 21 bp, Homo sapiens
caggttcacccgtaacccact

SEQ ID NO: 16735 - DNA, 21 bp, Homo sapiens
ttggaagaattgtgttatata

SEQ ID NO: 16736 - DNA, 21 bp, Homo sapiens
aagggtagactgagtcttgaa

SEQ ID NO: 16737 - DNA, 21 bp, Homo sapiens
tagggtcaaatcagtcactca

SEQ ID NO: 16738 - DNA, 21 bp, Homo sapiens
cacctgcattgtgcaaggaaa

SEQ ID NO: 16739 - DNA, 21 bp, Homo sapiens
ccggagaggccgagtgatcta

SEQ ID NO: 16740 - DNA, 21 bp, Homo sapiens
cacaattctctctctccttaa

SEQ ID NO: 16741 - DNA, 21 bp, Homo sapiens
cagcacatagttagtgctcca

SEQ ID NO: 16742 - DNA, 21 bp, Homo sapiens
ttgacaaatcaatatattaaa

SEQ ID NO: 16743 - DNA, 21 bp, Homo sapiens
tgcaaggtacttgacacgcaa

SEQ ID NO: 16744 - DNA, 21 bp, Homo sapiens
aagagagaatagataacttca

SEQ ID NO: 16745 - DNA, 21 bp, Homo sapiens
aagaagatgagagtgattcaa

SEQ ID NO: 16746 - DNA, 21 bp, Homo sapiens
aaggagacaacaagtcccgaa

SEQ ID NO: 16747 - DNA, 21 bp, Homo sapiens
atgcatgtttctgtatgttaa

SEQ ID NO: 16748 - DNA, 21 bp, Homo sapiens
accaagcagactgctcgtaaa

SEQ ID NO: 16749 - DNA, 21 bp, Homo sapiens
atcgggtaaaggagtcgataa

SEQ ID NO: 16750 - DNA, 21 bp, Homo sapiens
ctggagacaagtggaccctaa

SEQ ID NO: 16751 - DNA, 21 bp, Homo sapiens
cagaagtttatttctcactta

SEQ ID NO: 16752 - DNA, 21 bp, Homo sapiens
cacatagattacactaaataa

SEQ ID NO: 16753 - DNA, 21 bp, Homo sapiens
gagaatgttgctgccactcaa

SEQ ID NO: 16754 - DNA, 21 bp, Homo sapiens
aaagaaaggaatatcattata

SEQ ID NO: 16755 - DNA, 21 bp, Homo sapiens
aagagggtccatcgccatcat

SEQ ID NO: 16756 - DNA, 21 bp, Homo sapiens
agggctggaagtaggcctgaa

SEQ ID NO: 16757 - DNA, 21 bp, Homo sapiens
aagatgttgtttcaacctgta

SEQ ID NO: 16758 - DNA, 21 bp, Homo sapiens
aagctttaagttgcaaatgaa

SEQ ID NO: 16759 - DNA, 21 bp, Homo sapiens
ccactccatagtgaatggtta

SEQ ID NO: 16760 - DNA, 21 bp, Homo sapiens
ttgattgtctttcatcggaaa

SEQ ID NO: 16761 - DNA, 21 bp, Homo sapiens
aacggtcaacagatactagaa

SEQ ID NO: 16762 - DNA, 21 bp, Homo sapiens
ctcattgtatgtggaacttta

SEQ ID NO: 16763 - DNA, 21 bp, Homo sapiens
atccagttcatctcacttcaa

SEQ ID NO: 16764 - DNA, 21 bp, Homo sapiens
aagcctttgagaagcatgaaa

SEQ ID NO: 16765 - DNA, 21 bp, Homo sapiens
caccagcattccagagtccaa

SEQ ID NO: 16766 - DNA, 21 bp, Homo sapiens
ctggaaataaataattcataa

SEQ ID NO: 16767 - DNA, 21 bp, Homo sapiens
caacatatgcactgactataa

SEQ ID NO: 16768 - DNA, 21 bp, Homo sapiens
ctcactctttactacaacata

SEQ ID NO: 16769 - DNA, 21 bp, Homo sapiens
cagcaacttcacaacccagta

SEQ ID NO: 16770 - DNA, 21 bp, Homo sapiens
caggcctcagatagacgccaa

SEQ ID NO: 16771 - DNA, 21 bp, Homo sapiens
tacaaatggagacacaggaaa

SEQ ID NO: 16772 - DNA, 21 bp, Homo sapiens
ccggctgctgcttacaccttt

SEQ ID NO: 16773 - DNA, 21 bp, Homo sapiens
aagggaagccaggctgagata

SEQ ID NO: 16774 - DNA, 21 bp, Homo sapiens
cagagtctgcctccatgagaa

SEQ ID NO: 16775 - DNA, 21 bp, Homo sapiens
agcctcggaaatttcctttaa

SEQ ID NO: 16776 - DNA, 21 bp, Homo sapiens
cccggaaagcagggcattcaa

SEQ ID NO: 16777 - DNA, 21 bp, Homo sapiens
aaggaactttgggaagatgat

SEQ ID NO: 16778 - DNA, 21 bp, Homo sapiens
ccgggcctccttgaaggttga

SEQ ID NO: 16779 - DNA, 21 bp, Homo sapiens
tagcataagatgcttccttaa

SEQ ID NO: 16780 - DNA, 21 bp, Homo sapiens
tacttaataaataaacattta

SEQ ID NO: 16781 - DNA, 21 bp, Homo sapiens
ctcctgggtagatgcatataa

SEQ ID NO: 16782 - DNA, 21 bp, Homo sapiens
cagcccaaggacagccaatta

SEQ ID NO: 16783 - DNA, 21 bp, Homo sapiens
ctgtgcctggcctgtattgta

SEQ ID NO: 16784 - DNA, 21 bp, Homo sapiens
aagcaggtggatgcaaatgaa

SEQ ID NO: 16785 - DNA, 21 bp, Homo sapiens
caagaaggcaaagacaataaa

SEQ ID NO: 16786 - DNA, 21 bp, Homo sapiens
cacctggaagctgccatctaa

SEQ ID NO: 16787 - DNA, 21 bp, Homo sapiens
tgcagagatccaggatacaaa

SEQ ID NO: 16788 - DNA, 21 bp, Homo sapiens
atacaacagcttcttaggtaa

SEQ ID NO: 16789 - DNA, 21 bp, Homo sapiens
cacctggaagctgccatctaa

SEQ ID NO: 16790 - DNA, 21 bp, Homo sapiens
gtgcatcctcacgtaagtgca

SEQ ID NO: 16791 - DNA, 21 bp, Homo sapiens
cccaaacgaggtgatcgactt

SEQ ID NO: 16792 - DNA, 21 bp, Homo sapiens
ctcctttcggtgcatgaacaa

SEQ ID NO: 16793 - DNA, 21 bp, Homo sapiens
aacaagaaacagaaagccaaa

SEQ ID NO: 16794 - DNA, 21 bp, Homo sapiens
agagatgagtattctgaacat

SEQ ID NO: 16795 - DNA, 21 bp, Homo sapiens
cagctgctgcggcgccatgat

SEQ ID NO: 16796 - DNA, 21 bp, Homo sapiens
ttgcaaataatgagaagccga

SEQ ID NO: 16797 - DNA, 21 bp, Homo sapiens
ctgcagcaaagcacatacaga

SEQ ID NO: 16798 - DNA, 21 bp, Homo sapiens
gatgagtgtgctgaacatata

SEQ ID NO: 16799 - DNA, 21 bp, Homo sapiens
cttgagaattatgtagaataa

SEQ ID NO: 16800 - DNA, 21 bp, Homo sapiens
cagaggtcatctttaagtaaa

SEQ ID NO: 16801 - DNA, 21 bp, Homo sapiens
aacattggccagggaagttaa

SEQ ID NO: 16802 - DNA, 21 bp, Homo sapiens
caggatggtgacttgtcttta

SEQ ID NO: 16803 - DNA, 21 bp, Homo sapiens
acggaaagcctttataatgta

SEQ ID NO: 16804 - DNA, 21 bp, Homo sapiens
cagaatgttattaatctttaa

SEQ ID NO: 16805 - DNA, 21 bp, Homo sapiens
ccgggaccctgcagaaatgaa

SEQ ID NO: 16806 - DNA, 21 bp, Homo sapiens
acccgggatcctcaaatagaa

SEQ ID NO: 16807 - DNA, 21 bp, Homo sapiens
ataaattctcacacacacata

SEQ ID NO: 16808 - DNA, 21 bp, Homo sapiens
ctgccctgttctatagctata

SEQ ID NO: 16809 - DNA, 21 bp, Homo sapiens
ttgaccgttgctgaaacttgt

SEQ ID NO: 16810 - DNA, 21 bp, Homo sapiens
ctgagcattcatctgaactat

SEQ ID NO: 16811 - DNA, 21 bp, Homo sapiens
acgcagatcactggccatcaa

SEQ ID NO: 16812 - DNA, 21 bp, Homo sapiens
atcgaggacatcatcatcaaa

SEQ ID NO: 16813 - DNA, 21 bp, Homo sapiens
aaccctagtgttggtacagca

SEQ ID NO: 16814 - DNA, 21 bp, Homo sapiens
cagagcgtttcaggcaatgaa

SEQ ID NO: 16815 - DNA, 21 bp, Homo sapiens
tcccaagtcaaagacactcca

SEQ ID NO: 16816 - DNA, 21 bp, Homo sapiens
cggcttgaaggaacagggcta

SEQ ID NO: 16817 - DNA, 21 bp, Homo sapiens
ttgtaactacttgaagttaaa

SEQ ID NO: 16818 - DNA, 21 bp, Homo sapiens
acggtctttctttgccaacta

SEQ ID NO: 16819 - DNA, 21 bp, Homo sapiens
cacgggaggtgacatgagcaa

SEQ ID NO: 16820 - DNA, 21 bp, Homo sapiens
gaaggagaaattccaaagaaa

SEQ ID NO: 16821 - DNA, 21 bp, Homo sapiens
caaagaaatgtagtttattta

SEQ ID NO: 16822 - DNA, 21 bp, Homo sapiens
ctggctgtgaaggacccttta

SEQ ID NO: 16823 - DNA, 21 bp, Homo sapiens
agggagcagtgaggacaccaa

SEQ ID NO: 16824 - DNA, 21 bp, Homo sapiens
cacaacgatgtgcttagtaaa

SEQ ID NO: 16825 - DNA, 21 bp, Homo sapiens
ctccttgtatcttcaaatgaa

SEQ ID NO: 16826 - DNA, 21 bp, Homo sapiens
atggtatactttattaagaaa

SEQ ID NO: 16827 - DNA, 21 bp, Homo sapiens
gccgatggagatgcctatgaa

SEQ ID NO: 16828 - DNA, 21 bp, Homo sapiens
cacggagaatgaccagctcaa

SEQ ID NO: 16829 - DNA, 21 bp, Homo sapiens
atggacaagaagaaagagtaa

SEQ ID NO: 16830 - DNA, 21 bp, Homo sapiens
cgcgggcgtctaggcaagaaa

SEQ ID NO: 16831 - DNA, 21 bp, Homo sapiens
acctatttatgaatatacaaa

SEQ ID NO: 16832 - DNA, 21 bp, Homo sapiens
aaaccattaaacagatttcta

SEQ ID NO: 16833 - DNA, 21 bp, Homo sapiens
aacccaagagaaagtcagaaa

SEQ ID NO: 16834 - DNA, 21 bp, Homo sapiens
atggaggaatgaggagttcaa

SEQ ID NO: 16835 - DNA, 21 bp, Homo sapiens
taccaccacgcccgctgtgta

SEQ ID NO: 16836 - DNA, 21 bp, Homo sapiens
ctgccttaagatttcccatta

SEQ ID NO: 16837 - DNA, 21 bp, Homo sapiens
atggtattggtgtaacatgta

SEQ ID NO: 16838 - DNA, 21 bp, Homo sapiens
aaggatcgcatggcagaacta

SEQ ID NO: 16839 - DNA, 21 bp, Homo sapiens
cgcggatagtgtgcaggcata

SEQ ID NO: 16840 - DNA, 21 bp, Homo sapiens
cctggtgttgtcaatcatgaa

SEQ ID NO: 16841 - DNA, 21 bp, Homo sapiens
tcccaagtggctaagacttaa

SEQ ID NO: 16842 - DNA, 21 bp, Homo sapiens
caggattagcttgtggtttat

SEQ ID NO: 16843 - DNA, 21 bp, Homo sapiens
ccgggcatacttagtatcttt

SEQ ID NO: 16844 - DNA, 21 bp, Homo sapiens
ctggttggtaaagaacattaa

SEQ ID NO: 16845 - DNA, 21 bp, Homo sapiens
gccgcaggcgttattcctaaa

SEQ ID NO: 16846 - DNA, 21 bp, Homo sapiens
cagccgaaagagcaactcata

SEQ ID NO: 16847 - DNA, 21 bp, Homo sapiens
aaccaaggaaatggccgcaaa

SEQ ID NO: 16848 - DNA, 21 bp, Homo sapiens
caggtgtgtataaatctgaca

SEQ ID NO: 16849 - DNA, 21 bp, Homo sapiens
acagaagaattcactactgaa

SEQ ID NO: 16850 - DNA, 21 bp, Homo sapiens
caccatcatactcaagcttta

SEQ ID NO: 16851 - DNA, 21 bp, Homo sapiens
tcccagggtctctacagattt

SEQ ID NO: 16852 - DNA, 21 bp, Homo sapiens
aaggagttgcaggaagcattt

SEQ ID NO: 16853 - DNA, 21 bp, Homo sapiens
ctagatgaagagttatcttaa

SEQ ID NO: 16854 - DNA, 21 bp, Homo sapiens
ctggagttccttgactaggaa

SEQ ID NO: 16855 - DNA, 21 bp, Homo sapiens
cccgaggctccacgtactcaa

SEQ ID NO: 16856 - DNA, 21 bp, Homo sapiens
cgcgcttgtcagggaacagaa

SEQ ID NO: 16857 - DNA, 21 bp, Homo sapiens
cttgtgatgtgtggagatcaa

SEQ ID NO: 16858 - DNA, 21 bp, Homo sapiens
ctccctggttatactgttata

SEQ ID NO: 16859 - DNA, 21 bp, Homo sapiens
ccgggccttgtgaacctgcaa

SEQ ID NO: 16860 - DNA, 21 bp, Homo sapiens
caccctggtcttctcctgtaa

SEQ ID NO: 16861 - DNA, 21 bp, Homo sapiens
atggctataacaacaaactaa

SEQ ID NO: 16862 - DNA, 21 bp, Homo sapiens
cagactcttcttagaagtcta

SEQ ID NO: 16863 - DNA, 21 bp, Homo sapiens
caggatcatccataccctaaa

SEQ ID NO: 16864 - DNA, 21 bp, Homo sapiens
cactgtaacataatccattaa

SEQ ID NO: 16865 - DNA, 21 bp, Homo sapiens
gcggctcagtttcactaacaa

SEQ ID NO: 16866 - DNA, 21 bp, Homo sapiens
cccgactttccgtgcaataaa

SEQ ID NO: 16867 - DNA, 21 bp, Homo sapiens
ggcgacatatactaacaacaa

SEQ ID NO: 16868 - DNA, 21 bp, Homo sapiens
ctggtgttacattatcaacat

SEQ ID NO: 16869 - DNA, 21 bp, Homo sapiens
atggtgcaagctggcattgaa

SEQ ID NO: 16870 - DNA, 21 bp, Homo sapiens
ctggtagattatcatggagta

SEQ ID NO: 16871 - DNA, 21 bp, Homo sapiens
cggagcagagttctcctcaga

SEQ ID NO: 16872 - DNA, 21 bp, Homo sapiens
cagatttcagtggtactgcga

SEQ ID NO: 16873 - DNA, 21 bp, Homo sapiens
cagggctactcccactggtta

SEQ ID NO: 16874 - DNA, 21 bp, Homo sapiens
ctccataagcctcagaatgaa

SEQ ID NO: 16875 - DNA, 21 bp, Homo sapiens
cagcaaccacgccaccatgaa

SEQ ID NO: 16876 - DNA, 21 bp, Homo sapiens
ctgaacagggttctaaccaaa

SEQ ID NO: 16877 - DNA, 21 bp, Homo sapiens
caggcatcacatccagactca

SEQ ID NO: 16878 - DNA, 21 bp, Homo sapiens
agcctttgtaggaacgagaaa

SEQ ID NO: 16879 - DNA, 21 bp, Homo sapiens
aagcagagaaatgcaaactaa

SEQ ID NO: 16880 - DNA, 21 bp, Homo sapiens
ttgcttcaaatagggccagta

SEQ ID NO: 16881 - DNA, 21 bp, Homo sapiens
gagggagatgcgctccctgga

SEQ ID NO: 16882 - DNA, 21 bp, Homo sapiens
cccgcctctcgtggtgctcta

SEQ ID NO: 16883 - DNA, 21 bp, Homo sapiens
ctccaaatatctcatcaacaa

SEQ ID NO: 16884 - DNA, 21 bp, Homo sapiens
aaccaacacactaaccatata

SEQ ID NO: 16885 - DNA, 21 bp, Homo sapiens
aagcacagtttcctatgacaa

SEQ ID NO: 16886 - DNA, 21 bp, Homo sapiens
cacgtcactcagaaagttgaa

SEQ ID NO: 16887 - DNA, 21 bp, Homo sapiens
tcgaaacaccagcgcatatca

SEQ ID NO: 16888 - DNA, 21 bp, Homo sapiens
accagcttcatttgatcaaga

SEQ ID NO: 16889 - DNA, 21 bp, Homo sapiens
gagctctatgatgagcatgta

SEQ ID NO: 16890 - DNA, 21 bp, Homo sapiens
ctgctcgtgttaaatctagaa

SEQ ID NO: 16891 - DNA, 21 bp, Homo sapiens
aaggtcttaagtgcagcagga

SEQ ID NO: 16892 - DNA, 21 bp, Homo sapiens
aagctctttgttggagaagga

SEQ ID NO: 16893 - DNA, 21 bp, Homo sapiens
ccgtttaatatcagagagaaa

SEQ ID NO: 16894 - DNA, 21 bp, Homo sapiens
aaccatatttatgaaagtaaa

SEQ ID NO: 16895 - DNA, 21 bp, Homo sapiens
ccgggatgacctaaggaacaa

SEQ ID NO: 16896 - DNA, 21 bp, Homo sapiens
cagagagtgatgactgcttaa

SEQ ID NO: 16897 - DNA, 21 bp, Homo sapiens
tcaggttatgttggagctaaa

SEQ ID NO: 16898 - DNA, 21 bp, Homo sapiens
aagcgaatttatgatctgaaa

SEQ ID NO: 16899 - DNA, 21 bp, Homo sapiens
caggcagtcatgtggcccgaa

SEQ ID NO: 16900 - DNA, 21 bp, Homo sapiens
cccaaacatcttattgatact

SEQ ID NO: 16901 - DNA, 21 bp, Homo sapiens
ttgggtttccttcagtctcaa

SEQ ID NO: 16902 - DNA, 21 bp, Homo sapiens
gtgggtgaagtggaagaacaa

SEQ ID NO: 16903 - DNA, 21 bp, Homo sapiens
ctggaacatgtaggccttgta

SEQ ID NO: 16904 - DNA, 21 bp, Homo sapiens
tagctacagcatattatttaa

SEQ ID NO: 16905 - DNA, 21 bp, Homo sapiens
actgtgaaaggcctccagtta

SEQ ID NO: 16906 - DNA, 21 bp, Homo sapiens
cagcaggaatatcacaataca

SEQ ID NO: 16907 - DNA, 21 bp, Homo sapiens
aagccttgttaacttgctgaa

SEQ ID NO: 16908 - DNA, 21 bp, Homo sapiens
cacatcgtgtttgggatcaaa

SEQ ID NO: 16909 - DNA, 21 bp, Homo sapiens
caccaagaagtttctgacaat

SEQ ID NO: 16910 - DNA, 21 bp, Homo sapiens
gagaatgttcctcttcagtaa

SEQ ID NO: 16911 - DNA, 21 bp, Homo sapiens
cagcagctgttgccaaatgaa

SEQ ID NO: 16912 - DNA, 21 bp, Homo sapiens
cacgcgggttctgccctcaaa

SEQ ID NO: 16913 - DNA, 21 bp, Homo sapiens
aaggatgtcatcaaagtagtt

SEQ ID NO: 16914 - DNA, 21 bp, Homo sapiens
taggagatctttcacttgtaa

SEQ ID NO: 16915 - DNA, 21 bp, Homo sapiens
gaacataagtttctatttcaa

SEQ ID NO: 16916 - DNA, 21 bp, Homo sapiens
cagaggcgcttcaggaagcaa

SEQ ID NO: 16917 - DNA, 21 bp, Homo sapiens
aggaatgaacataagtttcta

SEQ ID NO: 16918 - DNA, 21 bp, Homo sapiens
gtgcaattcgtcagaacttaa

SEQ ID NO: 16919 - DNA, 21 bp, Homo sapiens
ctccttgtcaggagcacctaa

SEQ ID NO: 16920 - DNA, 21 bp, Homo sapiens
agggattattactcactgcaa

SEQ ID NO: 16921 - DNA, 21 bp, Homo sapiens
ctgcaacttagcctagcatta

SEQ ID NO: 16922 - DNA, 21 bp, Homo sapiens
tagcattaagttgcttgacta

SEQ ID NO: 16923 - DNA, 21 bp, Homo sapiens
aagcagatcagtgctcaagta

SEQ ID NO: 16924 - DNA, 21 bp, Homo sapiens
taggagttgtagagcagagaa

SEQ ID NO: 16925 - DNA, 21 bp, Homo sapiens
aagccaattgatgacatatat

SEQ ID NO: 16926 - DNA, 21 bp, Homo sapiens
aagcgtaaagcttgaaatata

SEQ ID NO: 16927 - DNA, 21 bp, Homo sapiens
caccttcatgctcagcattca

SEQ ID NO: 16928 - DNA, 21 bp, Homo sapiens
tccgaatttcttgatcaagaa

SEQ ID NO: 16929 - DNA, 21 bp, Homo sapiens
ccgagactcagacttacccaa

SEQ ID NO: 16930 - DNA, 21 bp, Homo sapiens
ctgcatcttctcatcccatat

SEQ ID NO: 16931 - DNA, 21 bp, Homo sapiens
aggcatcacgtccacatgcaa

SEQ ID NO: 16932 - DNA, 21 bp, Homo sapiens
cagtgtggcatgggcatgtaa

SEQ ID NO: 16933 - DNA, 21 bp, Homo sapiens
aagggaaagggtgaccacata

SEQ ID NO: 16934 - DNA, 21 bp, Homo sapiens
cactgtgaagaatatattaaa

SEQ ID NO: 16935 - DNA, 21 bp, Homo sapiens
ttgcatcaaatgggaccttaa

SEQ ID NO: 16936 - DNA, 21 bp, Homo sapiens
acgagacttacaaataataaa

SEQ ID NO: 16937 - DNA, 21 bp, Homo sapiens
ctggctttaatagtgattcat

SEQ ID NO: 16938 - DNA, 21 bp, Homo sapiens
tacctaagttctggtatctaa

SEQ ID NO: 16939 - DNA, 21 bp, Homo sapiens
ccgggaagtgtacgtcggtaa

SEQ ID NO: 16940 - DNA, 21 bp, Homo sapiens
cacaactatctcaggccttaa

SEQ ID NO: 16941 - DNA, 21 bp, Homo sapiens
atccaattctctacaccataa

SEQ ID NO: 16942 - DNA, 21 bp, Homo sapiens
atgcagaatcaacaacaacaa

SEQ ID NO: 16943 - DNA, 21 bp, Homo sapiens
ctgcttgaagctggcatttga

SEQ ID NO: 16944 - DNA, 21 bp, Homo sapiens
atggctggttactgtgctaaa

SEQ ID NO: 16945 - DNA, 21 bp, Homo sapiens
acaagtgttaatcccaataaa

SEQ ID NO: 16946 - DNA, 21 bp, Homo sapiens
cagggaagacacagtcactaa

SEQ ID NO: 16947 - DNA, 21 bp, Homo sapiens
cacggtgctcctggaggccta

SEQ ID NO: 16948 - DNA, 21 bp, Homo sapiens
cacgctcacggtcaagtatga

SEQ ID NO: 16949 - DNA, 21 bp, Homo sapiens
cagcagtaacttattaaatct

SEQ ID NO: 16950 - DNA, 21 bp, Homo sapiens
cacagccgagttgctagctaa

SEQ ID NO: 16951 - DNA, 21 bp, Homo sapiens
acccatgaacatgtacaatta

SEQ ID NO: 16952 - DNA, 21 bp, Homo sapiens
atggctaataatcacatgata

SEQ ID NO: 16953 - DNA, 21 bp, Homo sapiens
ccggtagccagtcagaattta

SEQ ID NO: 16954 - DNA, 21 bp, Homo sapiens
cacggtcaagacggaagcaaa

SEQ ID NO: 16955 - DNA, 21 bp, Homo sapiens
aagcaaatggctcatttccaa

SEQ ID NO: 16956 - DNA, 21 bp, Homo sapiens
aacctctaagatttgaatgaa

SEQ ID NO: 16957 - DNA, 21 bp, Homo sapiens
caggtagatgataaggagatt

SEQ ID NO: 16958 - DNA, 21 bp, Homo sapiens
aaagaagaatctgaagtgaaa

SEQ ID NO: 16959 - DNA, 21 bp, Homo sapiens
ctggcgttaaagaggtccata

SEQ ID NO: 16960 - DNA, 21 bp, Homo sapiens
tagaatatggaggccctgaaa

SEQ ID NO: 16961 - DNA, 21 bp, Homo sapiens
tagactcagagagatggcaaa

SEQ ID NO: 16962 - DNA, 21 bp, Homo sapiens
cagaacaaacatagtacggca

SEQ ID NO: 16963 - DNA, 21 bp, Homo sapiens
acggagcattacattcccaga

SEQ ID NO: 16964 - DNA, 21 bp, Homo sapiens
cccggaatcaatgggaatgaa

SEQ ID NO: 16965 - DNA, 21 bp, Homo sapiens
aacattcttcattatgcataa

SEQ ID NO: 16966 - DNA, 21 bp, Homo sapiens
cagcaggtgttgcttagtgaa

SEQ ID NO: 16967 - DNA, 21 bp, Homo sapiens
aaggtcttctcaaatattgta

SEQ ID NO: 16968 - DNA, 21 bp, Homo sapiens
ctgcagcggagccatggccca

SEQ ID NO: 16969 - DNA, 21 bp, Homo sapiens
aacagagatcctggataccaa

SEQ ID NO: 16970 - DNA, 21 bp, Homo sapiens
ctggaggaagacagcttatta

SEQ ID NO: 16971 - DNA, 21 bp, Homo sapiens
gcagatggcgagcatggcaaa

SEQ ID NO: 16972 - DNA, 21 bp, Homo sapiens
aagggagaccaaagttggaaa

SEQ ID NO: 16973 - DNA, 21 bp, Homo sapiens
cagatccatgctgatcccgca

SEQ ID NO: 16974 - DNA, 21 bp, Homo sapiens
cagggcgctgagtaccatgta

SEQ ID NO: 16975 - DNA, 21 bp, Homo sapiens
ttgagggatttcagacttcaa

SEQ ID NO: 16976 - DNA, 21 bp, Homo sapiens
aagtcttatttaagaaatata

SEQ ID NO: 16977 - DNA, 21 bp, Homo sapiens
ttgaatttgtgttcaaagtaa

SEQ ID NO: 16978 - DNA, 21 bp, Homo sapiens
ctgggaagaaagcaacacaaa

SEQ ID NO: 16979 - DNA, 21 bp, Homo sapiens
ctggagtgacagttcaagtaa

SEQ ID NO: 16980 - DNA, 21 bp, Homo sapiens
caggatgaattcttcaccaaa

SEQ ID NO: 16981 - DNA, 21 bp, Homo sapiens
ctggacatatttcttctggaa

SEQ ID NO: 16982 - DNA, 21 bp, Homo sapiens
ccggaacagagatttactcaa

SEQ ID NO: 16983 - DNA, 21 bp, Homo sapiens
acgaacgtaatttgtttctga

SEQ ID NO: 16984 - DNA, 21 bp, Homo sapiens
aagggagagaagagagttgaa

SEQ ID NO: 16985 - DNA, 21 bp, Homo sapiens
tccagtctgtttactatacat

SEQ ID NO: 16986 - DNA, 21 bp, Homo sapiens
gggactcaaagtattagctaa

SEQ ID NO: 16987 - DNA, 21 bp, Homo sapiens
ccgggaagcctggctccgaaa

SEQ ID NO: 16988 - DNA, 21 bp, Homo sapiens
cacattacagttaatctgtaa

SEQ ID NO: 16989 - DNA, 21 bp, Homo sapiens
cagaaagtttgtgaagatctt

SEQ ID NO: 16990 - DNA, 21 bp, Homo sapiens
atggtctgactttcacagaaa

SEQ ID NO: 16991 - DNA, 21 bp, Homo sapiens
ccggttcatctaatacagaca

SEQ ID NO: 16992 - DNA, 21 bp, Homo sapiens
cagatttgtcaaggtttgaaa

SEQ ID NO: 16993 - DNA, 21 bp, Homo sapiens
aaggaaggaatttatctacca

SEQ ID NO: 16994 - DNA, 21 bp, Homo sapiens
cacgagaaatattacgttgta

SEQ ID NO: 16995 - DNA, 21 bp, Homo sapiens
aaagagatacgtatgtactta

SEQ ID NO: 16996 - DNA, 21 bp, Homo sapiens
cagtggctgtgaagaatataa

SEQ ID NO: 16997 - DNA, 21 bp, Homo sapiens
atccgtcacactagatgcata

SEQ ID NO: 16998 - DNA, 21 bp, Homo sapiens
ccggagccgtttacagtttga

SEQ ID NO: 16999 - DNA, 21 bp, Homo sapiens
aacagtgaataagcaccataa

SEQ ID NO: 17000 - DNA, 21 bp, Homo sapiens
taggaggaaggccacaactaa

SEQ ID NO: 17001 - DNA, 21 bp, Homo sapiens
cagaggttagcctaactacaa

SEQ ID NO: 17002 - DNA, 21 bp, Homo sapiens
ataggtttaagagttaatata

SEQ ID NO: 17003 - DNA, 21 bp, Homo sapiens
aagatcaatgccctcattaaa

SEQ ID NO: 17004 - DNA, 21 bp, Homo sapiens
aagaaagtggaagcaaagaaa

SEQ ID NO: 17005 - DNA, 21 bp, Homo sapiens
ccgctaggtgtaggaccgcta

SEQ ID NO: 17006 - DNA, 21 bp, Homo sapiens
ttggcagaatactcaggtcaa

SEQ ID NO: 17007 - DNA, 21 bp, Homo sapiens
acctgagaattcaatgatgta

SEQ ID NO: 17008 - DNA, 21 bp, Homo sapiens
cccaacctacaggaagcataa

SEQ ID NO: 17009 - DNA, 21 bp, Homo sapiens
cagggcgacagtgtagggcca

SEQ ID NO: 17010 - DNA, 21 bp, Homo sapiens
agcctgcgtctcagcagcaaa

SEQ ID NO: 17011 - DNA, 21 bp, Homo sapiens
ctcatttaccttccacataaa

SEQ ID NO: 17012 - DNA, 21 bp, Homo sapiens
aaggaacagatgtacagtaaa

SEQ ID NO: 17013 - DNA, 21 bp, Homo sapiens
ctgcaccaattcgctcattta

SEQ ID NO: 17014 - DNA, 21 bp, Homo sapiens
cagccagttcatagacaccaa

SEQ ID NO: 17015 - DNA, 21 bp, Homo sapiens
cgggagaatatgcagcaataa

SEQ ID NO: 17016 - DNA, 21 bp, Homo sapiens
ccggctcaggtatttattgaa

SEQ ID NO: 17017 - DNA, 21 bp, Homo sapiens
cggcagacacaccacgttcca

SEQ ID NO: 17018 - DNA, 21 bp, Homo sapiens
taggtctatcagtgctttgga

SEQ ID NO: 17019 - DNA, 21 bp, Homo sapiens
aaggaagagagtgattatata

SEQ ID NO: 17020 - DNA, 21 bp, Homo sapiens
caacatcttattgctatttaa

SEQ ID NO: 17021 - DNA, 21 bp, Homo sapiens
atggagtaaactacagcttaa

SEQ ID NO: 17022 - DNA, 21 bp, Homo sapiens
taggatatatttgtcccttaa

SEQ ID NO: 17023 - DNA, 21 bp, Homo sapiens
cagggtaatcacggaatccca

SEQ ID NO: 17024 - DNA, 21 bp, Homo sapiens
aagggagagattggtgatgta

SEQ ID NO: 17025 - DNA, 21 bp, Homo sapiens
gaggatgtatgtgatgagtaa

SEQ ID NO: 17026 - DNA, 21 bp, Homo sapiens
ctgctgtaaaccaatgttaaa

SEQ ID NO: 17027 - DNA, 21 bp, Homo sapiens
ttcgctctcgccgccgaggaa

SEQ ID NO: 17028 - DNA, 21 bp, Homo sapiens
aaggaggagttcgaatgcctt

SEQ ID NO: 17029 - DNA, 21 bp, Homo sapiens
ccagaactggcagcccttaaa

SEQ ID NO: 17030 - DNA, 21 bp, Homo sapiens
tagcgtgccgtggccattgaa

SEQ ID NO: 17031 - DNA, 21 bp, Homo sapiens
aaggttcatagttgtgttgta

SEQ ID NO: 17032 - DNA, 21 bp, Homo sapiens
taggctatttcaagaaattaa

SEQ ID NO: 17033 - DNA, 21 bp, Homo sapiens
tgcagaattcattataataaa

SEQ ID NO: 17034 - DNA, 21 bp, Homo sapiens
caggtgagacttcaccgtgaa

SEQ ID NO: 17035 - DNA, 21 bp, Homo sapiens
caccctatggatgaacaggat

SEQ ID NO: 17036 - DNA, 21 bp, Homo sapiens
cacaagcatctgatgaagcaa

SEQ ID NO: 17037 - DNA, 21 bp, Homo sapiens
tccctccatccttgccctaaa

SEQ ID NO: 17038 - DNA, 21 bp, Homo sapiens
accatgagttgtcacatctaa

SEQ ID NO: 17039 - DNA, 21 bp, Homo sapiens
cggaatgaccttacttggtaa

SEQ ID NO: 17040 - DNA, 21 bp, Homo sapiens
taccattaaattcagctgaaa

SEQ ID NO: 17041 - DNA, 21 bp, Homo sapiens
aagaatctttacaaagctgaa

SEQ ID NO: 17042 - DNA, 21 bp, Homo sapiens
aaggatgagagtggatgtcaa

SEQ ID NO: 17043 - DNA, 21 bp, Homo sapiens
caacttggtaagaacacataa

SEQ ID NO: 17044 - DNA, 21 bp, Homo sapiens
gtgagaaataatactcataaa

SEQ ID NO: 17045 - DNA, 21 bp, Homo sapiens
aaggtttgctctaacctagaa

SEQ ID NO: 17046 - DNA, 21 bp, Homo sapiens
tagcaggaattcttatatcaa

SEQ ID NO: 17047 - DNA, 21 bp, Homo sapiens
ctggagtaagaaatatttcat

SEQ ID NO: 17048 - DNA, 21 bp, Homo sapiens
ctggcttagtatggacttcaa

SEQ ID NO: 17049 - DNA, 21 bp, Homo sapiens
accatttgcaatgaagaggaa

SEQ ID NO: 17050 - DNA, 21 bp, Homo sapiens
aggaaaggaatttgacattaa

SEQ ID NO: 17051 - DNA, 21 bp, Homo sapiens
aactcccaatttggaaagtaa

SEQ ID NO: 17052 - DNA, 21 bp, Homo sapiens
ctgctaaagaataaatgtaaa

SEQ ID NO: 17053 - DNA, 21 bp, Homo sapiens
ctacaagaaatcgaagagaaa

SEQ ID NO: 17054 - DNA, 21 bp, Homo sapiens
caccaaggaaatgaaagttca

SEQ ID NO: 17055 - DNA, 21 bp, Homo sapiens
cgggacctgaaccgagagcaa

SEQ ID NO: 17056 - DNA, 21 bp, Homo sapiens
cagggttccatcaggaaggaa

SEQ ID NO: 17057 - DNA, 21 bp, Homo sapiens
cagcttgaacaactcagctaa

SEQ ID NO: 17058 - DNA, 21 bp, Homo sapiens
cccatggatattgaaaggata

SEQ ID NO: 17059 - DNA, 21 bp, Homo sapiens
aagagctgagacagaagtaca

SEQ ID NO: 17060 - DNA, 21 bp, Homo sapiens
aaactggacaaagactgtgaa

SEQ ID NO: 17061 - DNA, 21 bp, Homo sapiens
agggttcaacctccaacctta

SEQ ID NO: 17062 - DNA, 21 bp, Homo sapiens
cctgagatcgataaagcttaa

SEQ ID NO: 17063 - DNA, 21 bp, Homo sapiens
aagatggagtttggaaggata

SEQ ID NO: 17064 - DNA, 21 bp, Homo sapiens
ctggaagattctgttcatgta

SEQ ID NO: 17065 - DNA, 21 bp, Homo sapiens
aagcctcagagtatttcgaaa

SEQ ID NO: 17066 - DNA, 21 bp, Homo sapiens
aacatttcactttacatctaa

SEQ ID NO: 17067 - DNA, 21 bp, Homo sapiens
aaccacagatctcgtaggaaa

SEQ ID NO: 17068 - DNA, 21 bp, Homo sapiens
cacgatgtatttatttgattt

SEQ ID NO: 17069 - DNA, 21 bp, Homo sapiens
gtggaagaattcatatatgaa

SEQ ID NO: 17070 - DNA, 21 bp, Homo sapiens
aaggatcttagctttgagaaa

SEQ ID NO: 17071 - DNA, 21 bp, Homo sapiens
ctggaagagtagaaacagaga

SEQ ID NO: 17072 - DNA, 21 bp, Homo sapiens
caggtggtgtttgggtgcata

SEQ ID NO: 17073 - DNA, 21 bp, Homo sapiens
aagcccaaatagagaacagta

SEQ ID NO: 17074 - DNA, 21 bp, Homo sapiens
aagaggcacctaattccttaa

SEQ ID NO: 17075 - DNA, 21 bp, Homo sapiens
cccactcaccgcacaccatca

SEQ ID NO: 17076 - DNA, 21 bp, Homo sapiens
cagggcgcctctagtccctca

SEQ ID NO: 17077 - DNA, 21 bp, Homo sapiens
ttgggaggtgatgtcatataa

SEQ ID NO: 17078 - DNA, 21 bp, Homo sapiens
cagacggtacatacactctaa

SEQ ID NO: 17079 - DNA, 21 bp, Homo sapiens
cagaatgactacccatgcaaa

SEQ ID NO: 17080 - DNA, 21 bp, Homo sapiens
aagacaggtactggaagataa

SEQ ID NO: 17081 - DNA, 21 bp, Homo sapiens
ccgggattcagaattgatcca

SEQ ID NO: 17082 - DNA, 21 bp, Homo sapiens
ctgcacgtcacggctactcaa

SEQ ID NO: 17083 - DNA, 21 bp, Homo sapiens
atgggacatgcatataaacta

SEQ ID NO: 17084 - DNA, 21 bp, Homo sapiens
tacctaatacactgcaatata

SEQ ID NO: 17085 - DNA, 21 bp, Homo sapiens
cacccttaaactacaaagaga

SEQ ID NO: 17086 - DNA, 21 bp, Homo sapiens
aaagaagacatcacccttaaa

SEQ ID NO: 17087 - DNA, 21 bp, Homo sapiens
cacctgctactcagaaagcta

SEQ ID NO: 17088 - DNA, 21 bp, Homo sapiens
ttggaagagattcttattaaa

SEQ ID NO: 17089 - DNA, 21 bp, Homo sapiens
caggcaagctttcaactataa

SEQ ID NO: 17090 - DNA, 21 bp, Homo sapiens
ctgaaggtaatcagagattaa

SEQ ID NO: 17091 - DNA, 21 bp, Homo sapiens
cccagaaacactgtactttat

SEQ ID NO: 17092 - DNA, 21 bp, Homo sapiens
atgatgaatcaccaacactaa

SEQ ID NO: 17093 - DNA, 21 bp, Homo sapiens
caggaccatttgactatttca

SEQ ID NO: 17094 - DNA, 21 bp, Homo sapiens
taagttatttatactcattta

SEQ ID NO: 17095 - DNA, 21 bp, Homo sapiens
ccgggcctcagtttcccggaa

SEQ ID NO: 17096 - DNA, 21 bp, Homo sapiens
cccggaggagatcgcgcgcaa

SEQ ID NO: 17097 - DNA, 21 bp, Homo sapiens
aaggatacttgttaaccttaa

SEQ ID NO: 17098 - DNA, 21 bp, Homo sapiens
tccagctttgttggtattcaa

SEQ ID NO: 17099 - DNA, 21 bp, Homo sapiens
ctggctgtcaatttatcagta

SEQ ID NO: 17100 - DNA, 21 bp, Homo sapiens
aggaagattgttggtgatgaa

SEQ ID NO: 17101 - DNA, 21 bp, Homo sapiens
ttgcaaagagaagaagatcaa

SEQ ID NO: 17102 - DNA, 21 bp, Homo sapiens
cagggtgtatgaggagagaaa

SEQ ID NO: 17103 - DNA, 21 bp, Homo sapiens
cagcatgtcttcagccaggaa

SEQ ID NO: 17104 - DNA, 21 bp, Homo sapiens
ctggtggttgtactcagataa

SEQ ID NO: 17105 - DNA, 21 bp, Homo sapiens
ctgagaaatggaataatcgta

SEQ ID NO: 17106 - DNA, 21 bp, Homo sapiens
caggatgaacggcgccaggta

SEQ ID NO: 17107 - DNA, 21 bp, Homo sapiens
caggtcatatcctgagatcaa

SEQ ID NO: 17108 - DNA, 21 bp, Homo sapiens
cactgtcctgattataaataa

SEQ ID NO: 17109 - DNA, 21 bp, Homo sapiens
aggccaaagctttgtatttca

SEQ ID NO: 17110 - DNA, 21 bp, Homo sapiens
acagagtggtgtggagaataa

SEQ ID NO: 17111 - DNA, 21 bp, Homo sapiens
ttgctccatacagacctccca

SEQ ID NO: 17112 - DNA, 21 bp, Homo sapiens
ctgctgatttcttcacttgct

SEQ ID NO: 17113 - DNA, 21 bp, Homo sapiens
aaggatgtttggaggcttcaa

SEQ ID NO: 17114 - DNA, 21 bp, Homo sapiens
ccggccttcgtttccattcaa

SEQ ID NO: 17115 - DNA, 21 bp, Homo sapiens
ctgaatgatatttaagctgaa

SEQ ID NO: 17116 - DNA, 21 bp, Homo sapiens
ggcgaccttgctgcaggacaa

SEQ ID NO: 17117 - DNA, 21 bp, Homo sapiens
gacgttgtagttggcgtggtt

SEQ ID NO: 17118 - DNA, 21 bp, Homo sapiens
ctggaatgcctttgtacatat

SEQ ID NO: 17119 - DNA, 21 bp, Homo sapiens
accaaagagcgtggaaggaaa

SEQ ID NO: 17120 - DNA, 21 bp, Homo sapiens
tccggatcagaaggagcagga

SEQ ID NO: 17121 - DNA, 21 bp, Homo sapiens
tagggaagggtggttctgcaa

SEQ ID NO: 17122 - DNA, 21 bp, Homo sapiens
caccttggatctaggagacaa

SEQ ID NO: 17123 - DNA, 21 bp, Homo sapiens
caccaggacctgaaatgttat

SEQ ID NO: 17124 - DNA, 21 bp, Homo sapiens
ccagctggatatcacgggaaa

SEQ ID NO: 17125 - DNA, 21 bp, Homo sapiens
aaggaacaacggtcacaccaa

SEQ ID NO: 17126 - DNA, 21 bp, Homo sapiens
cccaccttgatttagacctgt

SEQ ID NO: 17127 - DNA, 21 bp, Homo sapiens
cccaagctgtatgtgaagcta

SEQ ID NO: 17128 - DNA, 21 bp, Homo sapiens
aaggacaaggccattaagaaa

SEQ ID NO: 17129 - DNA, 21 bp, Homo sapiens
acagatcctggtcagagtaaa

SEQ ID NO: 17130 - DNA, 21 bp, Homo sapiens
caggtgctggttatgctttat

SEQ ID NO: 17131 - DNA, 21 bp, Homo sapiens
cagccggtcaaagcagcagaa

SEQ ID NO: 17132 - DNA, 21 bp, Homo sapiens
atgacagattatgagaatgaa

SEQ ID NO: 17133 - DNA, 21 bp, Homo sapiens
aaggcgtgctgtcgcctgcaa

SEQ ID NO: 17134 - DNA, 21 bp, Homo sapiens
aagaggtttctgggtcatcta

SEQ ID NO: 17135 - DNA, 21 bp, Homo sapiens
aacacccataagaattcctat

SEQ ID NO: 17136 - DNA, 21 bp, Homo sapiens
cagaaggaacaagcacaatat

SEQ ID NO: 17137 - DNA, 21 bp, Homo sapiens
caggaaatatgatgcgaggaa

SEQ ID NO: 17138 - DNA, 21 bp, Homo sapiens
cagggtgtaccatggcatgaa

SEQ ID NO: 17139 - DNA, 21 bp, Homo sapiens
aaggaggaatttcagggtgaa

SEQ ID NO: 17140 - DNA, 21 bp, Homo sapiens
tagcacgatttcctatgacca

SEQ ID NO: 17141 - DNA, 21 bp, Homo sapiens
ctgggttctgctgacatgtga

SEQ ID NO: 17142 - DNA, 21 bp, Homo sapiens
taggacgaatttcttgctcca

SEQ ID NO: 17143 - DNA, 21 bp, Homo sapiens
cagctctgaaatcattgccaa

SEQ ID NO: 17144 - DNA, 21 bp, Homo sapiens
ttggtttatatgatctagtta

SEQ ID NO: 17145 - DNA, 21 bp, Homo sapiens
aactgctgtggaaaccaagaa

SEQ ID NO: 17146 - DNA, 21 bp, Homo sapiens
gtgcctctccatggagattca

SEQ ID NO: 17147 - DNA, 21 bp, Homo sapiens
ctaagtggagtggaccataaa

SEQ ID NO: 17148 - DNA, 21 bp, Homo sapiens
atgataatagcttaccacaaa

SEQ ID NO: 17149 - DNA, 21 bp, Homo sapiens
tgggaacaataaagcacttca

SEQ ID NO: 17150 - DNA, 21 bp, Homo sapiens
ctgcacctattgtcacagcaa

SEQ ID NO: 17151 - DNA, 21 bp, Homo sapiens
ctgggattaagacacaaacaa

SEQ ID NO: 17152 - DNA, 21 bp, Homo sapiens
cagggacaacttggatcttca

SEQ ID NO: 17153 - DNA, 21 bp, Homo sapiens
ctgcttggcggtagaccttaa

SEQ ID NO: 17154 - DNA, 21 bp, Homo sapiens
caggatcctaacgaagaccaa

SEQ ID NO: 17155 - DNA, 21 bp, Homo sapiens
aagcaaggtctcgctgtgtta

SEQ ID NO: 17156 - DNA, 21 bp, Homo sapiens
taggactttctttgcattcat

SEQ ID NO: 17157 - DNA, 21 bp, Homo sapiens
aagcgtcttcgtcttgctcat

SEQ ID NO: 17158 - DNA, 21 bp, Homo sapiens
ctgcacctcactggagcggaa

SEQ ID NO: 17159 - DNA, 21 bp, Homo sapiens
cgccgcctgcttcacttctta

SEQ ID NO: 17160 - DNA, 21 bp, Homo sapiens
cccaggagatagaaccttcta

SEQ ID NO: 17161 - DNA, 21 bp, Homo sapiens
ggccctgataaggccacccaa

SEQ ID NO: 17162 - DNA, 21 bp, Homo sapiens
ccacgctgggtttaagtgaca

SEQ ID NO: 17163 - DNA, 21 bp, Homo sapiens
atggaatcagcgaccacacta

SEQ ID NO: 17164 - DNA, 21 bp, Homo sapiens
tttgaccattgttaacaataa

SEQ ID NO: 17165 - DNA, 21 bp, Homo sapiens
cccagtggagcacgtcctcaa

SEQ ID NO: 17166 - DNA, 21 bp, Homo sapiens
ctccagaaacatgagcacaaa

SEQ ID NO: 17167 - DNA, 21 bp, Homo sapiens
cagaggcatgaagctagaata

SEQ ID NO: 17168 - DNA, 21 bp, Homo sapiens
caggttcatctcattagtgga

SEQ ID NO: 17169 - DNA, 21 bp, Homo sapiens
ctcactaaagctctagtgcaa

SEQ ID NO: 17170 - DNA, 21 bp, Homo sapiens
cagcacattcagttaatgtta

SEQ ID NO: 17171 - DNA, 21 bp, Homo sapiens
ctggagaataaccagcctaca

SEQ ID NO: 17172 - DNA, 21 bp, Homo sapiens
cagagtttgaaagagacagaa

SEQ ID NO: 17173 - DNA, 21 bp, Homo sapiens
ctggcccagcatttaaactta

SEQ ID NO: 17174 - DNA, 21 bp, Homo sapiens
ctgaatattgtgcgcatgaaa

SEQ ID NO: 17175 - DNA, 21 bp, Homo sapiens
ctggaggaatcacccagtgaa

SEQ ID NO: 17176 - DNA, 21 bp, Homo sapiens
caggccactcaggatatccaa

SEQ ID NO: 17177 - DNA, 21 bp, Homo sapiens
aagccattcctcataccaata

SEQ ID NO: 17178 - DNA, 21 bp, Homo sapiens
aaagtatagtatatattaata

SEQ ID NO: 17179 - DNA, 21 bp, Homo sapiens
ctggcacccttcagatccttt

SEQ ID NO: 17180 - DNA, 21 bp, Homo sapiens
ccttacggatttcgcggttta

SEQ ID NO: 17181 - DNA, 21 bp, Homo sapiens
cagcattctgacgctgaagta

SEQ ID NO: 17182 - DNA, 21 bp, Homo sapiens
caggacatatgagacttatta

SEQ ID NO: 17183 - DNA, 21 bp, Homo sapiens
tcgaccaatttgccaacgtta

SEQ ID NO: 17184 - DNA, 21 bp, Homo sapiens
ctgggaatatggctcctgaaa

SEQ ID NO: 17185 - DNA, 21 bp, Homo sapiens
gcggatgagcaccaaccctga

SEQ ID NO: 17186 - DNA, 21 bp, Homo sapiens
cagacggcttgtatctcgcaa

SEQ ID NO: 17187 - DNA, 21 bp, Homo sapiens
atggaccaagtggaaggcaaa

SEQ ID NO: 17188 - DNA, 21 bp, Homo sapiens
caagagattatatgacatgaa

SEQ ID NO: 17189 - DNA, 21 bp, Homo sapiens
atcagaagacatagccagaaa

SEQ ID NO: 17190 - DNA, 21 bp, Homo sapiens
ctgcaagaaaggcctcaacaa

SEQ ID NO: 17191 - DNA, 21 bp, Homo sapiens
atgggtgactcttaaaggtta

SEQ ID NO: 17192 - DNA, 21 bp, Homo sapiens
ctgaatctagagctcattaaa

SEQ ID NO: 17193 - DNA, 21 bp, Homo sapiens
atggtccattataagactgaa

SEQ ID NO: 17194 - DNA, 21 bp, Homo sapiens
cagcatgatgccattgctgaa

SEQ ID NO: 17195 - DNA, 21 bp, Homo sapiens
ctggagctcactcgcattcat

SEQ ID NO: 17196 - DNA, 21 bp, Homo sapiens
cgggagttgaaggacttggaa

SEQ ID NO: 17197 - DNA, 21 bp, Homo sapiens
caggaacaactgaaccatcaa

SEQ ID NO: 17198 - DNA, 21 bp, Homo sapiens
atccatattgatgacaataaa

SEQ ID NO: 17199 - DNA, 21 bp, Homo sapiens
tagcaacaagatgaagaccca

SEQ ID NO: 17200 - DNA, 21 bp, Homo sapiens
tagccgcaaactagacccaaa

SEQ ID NO: 17201 - DNA, 21 bp, Homo sapiens
ccgggacctgtgacccactca

SEQ ID NO: 17202 - DNA, 21 bp, Homo sapiens
cacctgagacctgtcctgtga

SEQ ID NO: 17203 - DNA, 21 bp, Homo sapiens
caccatccaaggtatcgtgta

SEQ ID NO: 17204 - DNA, 21 bp, Homo sapiens
caggcctagcatagtccttta

SEQ ID NO: 17205 - DNA, 21 bp, Homo sapiens
ctcagacatgcctccgcgtaa

SEQ ID NO: 17206 - DNA, 21 bp, Homo sapiens
cacaaagagtttgttactgtt

SEQ ID NO: 17207 - DNA, 21 bp, Homo sapiens
tgggatgacagatgcattcaa

SEQ ID NO: 17208 - DNA, 21 bp, Homo sapiens
ccaggatatctaattcgctaa

SEQ ID NO: 17209 - DNA, 21 bp, Homo sapiens
tctggtatttattactagaaa

SEQ ID NO: 17210 - DNA, 21 bp, Homo sapiens
caccctaagtctgcacttcaa

SEQ ID NO: 17211 - DNA, 21 bp, Homo sapiens
acagctgtacatattatacta

SEQ ID NO: 17212 - DNA, 21 bp, Homo sapiens
caggaaactgccagaaagtaa

SEQ ID NO: 17213 - DNA, 21 bp, Homo sapiens
ttggaacatcggcaacacaaa

SEQ ID NO: 17214 - DNA, 21 bp, Homo sapiens
caggatgaagctcatgcctca

SEQ ID NO: 17215 - DNA, 21 bp, Homo sapiens
caggcaatggaagatgcatat

SEQ ID NO: 17216 - DNA, 21 bp, Homo sapiens
tagatgaaacttacaatataa

SEQ ID NO: 17217 - DNA, 21 bp, Homo sapiens
ctggccgagttgcacccttga

SEQ ID NO: 17218 - DNA, 21 bp, Homo sapiens
acggacgatggaggtctgtga

SEQ ID NO: 17219 - DNA, 21 bp, Homo sapiens
tccaaacagattccttgggaa

SEQ ID NO: 17220 - DNA, 21 bp, Homo sapiens
cagcttgtgattgaggaccta

SEQ ID NO: 17221 - DNA, 21 bp, Homo sapiens
tccgcggtctttaccctggaa

SEQ ID NO: 17222 - DNA, 21 bp, Homo sapiens
caggagcatgcaggcctacaa

SEQ ID NO: 17223 - DNA, 21 bp, Homo sapiens
cagcaggtgtgggaaatccta

SEQ ID NO: 17224 - DNA, 21 bp, Homo sapiens
atggacttggtcaacatcaaa

SEQ ID NO: 17225 - DNA, 21 bp, Homo sapiens
aaagattgctccaaagattaa

SEQ ID NO: 17226 - DNA, 21 bp, Homo sapiens
cagcaatatcccatccacaaa

SEQ ID NO: 17227 - DNA, 21 bp, Homo sapiens
ctgggaattctggatgttcca

SEQ ID NO: 17228 - DNA, 21 bp, Homo sapiens
ctgggtattctgggcattcca

SEQ ID NO: 17229 - DNA, 21 bp, Homo sapiens
aagcctatctagatctactaa

SEQ ID NO: 17230 - DNA, 21 bp, Homo sapiens
cagcctatctagacctactaa

SEQ ID NO: 17231 - DNA, 21 bp, Homo sapiens
ctctcggacattagtcaccaa

SEQ ID NO: 17232 - DNA, 21 bp, Homo sapiens
tcccgagaatgtgacatctaa

SEQ ID NO: 17233 - DNA, 21 bp, Homo sapiens
aagcttctaacgggttctcaa

SEQ ID NO: 17234 - DNA, 21 bp, Homo sapiens
ctgaatgtgagataatttata

SEQ ID NO: 17235 - DNA, 21 bp, Homo sapiens
acccaccttgttaggcataaa

SEQ ID NO: 17236 - DNA, 21 bp, Homo sapiens
tccaacctcattaaatataaa

SEQ ID NO: 17237 - DNA, 21 bp, Homo sapiens
cagttgaagatcaataagaaa

SEQ ID NO: 17238 - DNA, 21 bp, Homo sapiens
atgcatcgagttcacactaaa

SEQ ID NO: 17239 - DNA, 21 bp, Homo sapiens
accctgatttgtcctgataaa

SEQ ID NO: 17240 - DNA, 21 bp, Homo sapiens
tcctgataaagagaaggcata

SEQ ID NO: 17241 - DNA, 21 bp, Homo sapiens
cacgtcaattaccgcgaggaa

SEQ ID NO: 17242 - DNA, 21 bp, Homo sapiens
cagttctgtatcagtcttgaa

SEQ ID NO: 17243 - DNA, 21 bp, Homo sapiens
aagctccttctcctattatta

SEQ ID NO: 17244 - DNA, 21 bp, Homo sapiens
taggcagaatcccgtcaagaa

SEQ ID NO: 17245 - DNA, 21 bp, Homo sapiens
ccagttacatctggtgatcaa

SEQ ID NO: 17246 - DNA, 21 bp, Homo sapiens
aacgcttatggtatgaagaaa

SEQ ID NO: 17247 - DNA, 21 bp, Homo sapiens
atccagagtatggagaagtaa

SEQ ID NO: 17248 - DNA, 21 bp, Homo sapiens
caaatccaatatattaagaaa

SEQ ID NO: 17249 - DNA, 21 bp, Homo sapiens
caggagagacaggacccatta

SEQ ID NO: 17250 - DNA, 21 bp, Homo sapiens
caggagagacaggacctatta

SEQ ID NO: 17251 - DNA, 21 bp, Homo sapiens
caagttcatgcttataaattt

SEQ ID NO: 17252 - DNA, 21 bp, Homo sapiens
cagggactacagtgccttgaa

SEQ ID NO: 17253 - DNA, 21 bp, Homo sapiens
tgggaaatatgaggtcatgaa

SEQ ID NO: 17254 - DNA, 21 bp, Homo sapiens
ctggaggtacctgcagcggaa

SEQ ID NO: 17255 - DNA, 21 bp, Homo sapiens
agggatgaggtagcagagaaa

SEQ ID NO: 17256 - DNA, 21 bp, Homo sapiens
aaggctatgagaatacaccaa

SEQ ID NO: 17257 - DNA, 21 bp, Homo sapiens
cagaccatgacaacaacatca

SEQ ID NO: 17258 - DNA, 21 bp, Homo sapiens
tgagcagatcgcggagatcaa

SEQ ID NO: 17259 - DNA, 21 bp, Homo sapiens
tcgacagaccctggaggtgta

SEQ ID NO: 17260 - DNA, 21 bp, Homo sapiens
cagcaccatatccgacatcat

SEQ ID NO: 17261 - DNA, 21 bp, Homo sapiens
gacgacaagaactttagcaaa

SEQ ID NO: 17262 - DNA, 21 bp, Homo sapiens
cagaatcaaatgatcctgcaa

SEQ ID NO: 17263 - DNA, 21 bp, Homo sapiens
aagcttattgatggcattcat

SEQ ID NO: 17264 - DNA, 21 bp, Homo sapiens
acggcttcatttaacagtgaa

SEQ ID NO: 17265 - DNA, 21 bp, Homo sapiens
cagatagatctgtttcaagaa

SEQ ID NO: 17266 - DNA, 21 bp, Homo sapiens
aagggaaatgcttgatggtta

SEQ ID NO: 17267 - DNA, 21 bp, Homo sapiens
cagcatcatgagccagtttca

SEQ ID NO: 17268 - DNA, 21 bp, Homo sapiens
caggctgactcggtacgcaaa

SEQ ID NO: 17269 - DNA, 21 bp, Homo sapiens
cgagcaactctctgggaacta

SEQ ID NO: 17270 - DNA, 21 bp, Homo sapiens
tgaggtggtgtccttccgtaa

SEQ ID NO: 17271 - DNA, 21 bp, Homo sapiens
ccaggtgtcaaggacagcaaa

SEQ ID NO: 17272 - DNA, 21 bp, Homo sapiens
cagctccattgtctcccataa

SEQ ID NO: 17273 - DNA, 21 bp, Homo sapiens
ccgccagacattccaattgga

SEQ ID NO: 17274 - DNA, 21 bp, Homo sapiens
cacgggctacatgacctgtga

SEQ ID NO: 17275 - DNA, 21 bp, Homo sapiens
atcgtcattgttaatgagcta

SEQ ID NO: 17276 - DNA, 21 bp, Homo sapiens
aaggctgattacgagagcaaa

SEQ ID NO: 17277 - DNA, 21 bp, Homo sapiens
tcggacagacctccacttcaa

SEQ ID NO: 17278 - DNA, 21 bp, Homo sapiens
aaccctcagcttccatttaaa

SEQ ID NO: 17279 - DNA, 21 bp, Homo sapiens
aagggacatgtggaagtaata

SEQ ID NO: 17280 - DNA, 21 bp, Homo sapiens
cagattagtcaagaagatgaa

SEQ ID NO: 17281 - DNA, 21 bp, Homo sapiens
caggatttgaaggaagccaca

SEQ ID NO: 17282 - DNA, 21 bp, Homo sapiens
aacgacatctttggcaccaaa

SEQ ID NO: 17283 - DNA, 21 bp, Homo sapiens
cagaatagctttgcacataca

SEQ ID NO: 17284 - DNA, 21 bp, Homo sapiens
cagctggactttaagaatgta

SEQ ID NO: 17285 - DNA, 21 bp, Homo sapiens
cccgccttcgttatcatttgt

SEQ ID NO: 17286 - DNA, 21 bp, Homo sapiens
caccttctacctcttattcca

SEQ ID NO: 17287 - DNA, 21 bp, Homo sapiens
ctcatggctcttggaaggaaa

SEQ ID NO: 17288 - DNA, 21 bp, Homo sapiens
caccctggaagaaaccatcaa

SEQ ID NO: 17289 - DNA, 21 bp, Homo sapiens
ctcaaggagcctcatatggaa

SEQ ID NO: 17290 - DNA, 21 bp, Homo sapiens
ccggagcatggcagaactcca

SEQ ID NO: 17291 - DNA, 21 bp, Homo sapiens
ccgggtcctaaactctggata

SEQ ID NO: 17292 - DNA, 21 bp, Homo sapiens
taggctctgggtataagcttt

SEQ ID NO: 17293 - DNA, 21 bp, Homo sapiens
tgccagcaaagtccatgtaaa

SEQ ID NO: 17294 - DNA, 21 bp, Homo sapiens
aggaacaataattgtgccaaa

SEQ ID NO: 17295 - DNA, 21 bp, Homo sapiens
ctggctctgtgaattcgaata

SEQ ID NO: 17296 - DNA, 21 bp, Homo sapiens
ctggtgggagtgagaattgaa

SEQ ID NO: 17297 - DNA, 21 bp, Homo sapiens
gcggatcaggttcaaagtgat

SEQ ID NO: 17298 - DNA, 21 bp, Homo sapiens
caggaccaacatcctctccat

SEQ ID NO: 17299 - DNA, 21 bp, Homo sapiens
aacaataaaggcgagatgaaa

SEQ ID NO: 17300 - DNA, 21 bp, Homo sapiens
cagatcaagggatcaagggat

SEQ ID NO: 17301 - DNA, 21 bp, Homo sapiens
acggaagtacttggcatataa

SEQ ID NO: 17302 - DNA, 21 bp, Homo sapiens
caccatgtagttgtaattcaa

SEQ ID NO: 17303 - DNA, 21 bp, Homo sapiens
ctgacacctcagggtcagaaa

SEQ ID NO: 17304 - DNA, 21 bp, Homo sapiens
cagaggcacctataccaccaa

SEQ ID NO: 17305 - DNA, 21 bp, Homo sapiens
aagcagaaggacacagatgta

SEQ ID NO: 17306 - DNA, 21 bp, Homo sapiens
ccgaaccagatgaaacccaaa

SEQ ID NO: 17307 - DNA, 21 bp, Homo sapiens
gtgactttgaagatagcttca

SEQ ID NO: 17308 - DNA, 21 bp, Homo sapiens
ccggtgagtggcaaacaacga

SEQ ID NO: 17309 - DNA, 21 bp, Homo sapiens
cagaaacagggaaatcctgaa

SEQ ID NO: 17310 - DNA, 21 bp, Homo sapiens
cggaatggaaatactttctaa

SEQ ID NO: 17311 - DNA, 21 bp, Homo sapiens
atggctttgcaaaggagccaa

SEQ ID NO: 17312 - DNA, 21 bp, Homo sapiens
tggcatcatctcaggaagaaa

SEQ ID NO: 17313 - DNA, 21 bp, Homo sapiens
cccgtaacagatttccatgaa

SEQ ID NO: 17314 - DNA, 21 bp, Homo sapiens
caggtagtagtgacacatatt

SEQ ID NO: 17315 - DNA, 21 bp, Homo sapiens
gtgcgagatgagaaatctcaa

SEQ ID NO: 17316 - DNA, 21 bp, Homo sapiens
ccgggacaactgcaccagtga

SEQ ID NO: 17317 - DNA, 21 bp, Homo sapiens
aacgacaacatgaagttcgaa

SEQ ID NO: 17318 - DNA, 21 bp, Homo sapiens
cagggacgctttagcactcga

SEQ ID NO: 17319 - DNA, 21 bp, Homo sapiens
ccgcctctttgggcaccttaa

SEQ ID NO: 17320 - DNA, 21 bp, Homo sapiens
cagcgagatgaccaagacgaa

SEQ ID NO: 17321 - DNA, 21 bp, Homo sapiens
cggtgtgagcatggcagagaa

SEQ ID NO: 17322 - DNA, 21 bp, Homo sapiens
cagggccatttccattgtcat

SEQ ID NO: 17323 - DNA, 21 bp, Homo sapiens
ctggccaagaagccattcaca

SEQ ID NO: 17324 - DNA, 21 bp, Homo sapiens
cagagcctgcgcagtgtggta

SEQ ID NO: 17325 - DNA, 21 bp, Homo sapiens
catgatgaacacagtgtgaaa

SEQ ID NO: 17326 - DNA, 21 bp, Homo sapiens
cagctgaaagtcaggatagta

SEQ ID NO: 17327 - DNA, 21 bp, Homo sapiens
tgcattggacctgaccatgaa

SEQ ID NO: 17328 - DNA, 21 bp, Homo sapiens
taccttgaactgtatgtgcaa

SEQ ID NO: 17329 - DNA, 21 bp, Homo sapiens
caggatggaggctacgaaggt

SEQ ID NO: 17330 - DNA, 21 bp, Homo sapiens
ccgacccacaggctccagtaa

SEQ ID NO: 17331 - DNA, 21 bp, Homo sapiens
cagacttgagggcccagacaa

SEQ ID NO: 17332 - DNA, 21 bp, Homo sapiens
ctcgaagatgccagtatttca

SEQ ID NO: 17333 - DNA, 21 bp, Homo sapiens
tactatgacgtctccaactca

SEQ ID NO: 17334 - DNA, 21 bp, Homo sapiens
actgtttgtcatagtgccgta

SEQ ID NO: 17335 - DNA, 21 bp, Homo sapiens
cagtcacaatgagtaatttaa

SEQ ID NO: 17336 - DNA, 21 bp, Homo sapiens
cccgtcgaacacagccaccta

SEQ ID NO: 17337 - DNA, 21 bp, Homo sapiens
atcgggtattgagtccatgga

SEQ ID NO: 17338 - DNA, 21 bp, Homo sapiens
aagggtggagcacaacgtcaa

SEQ ID NO: 17339 - DNA, 21 bp, Homo sapiens
tggaattggcagcgtggcaaa

SEQ ID NO: 17340 - DNA, 21 bp, Homo sapiens
tccaccttacatgcagttgta

SEQ ID NO: 17341 - DNA, 21 bp, Homo sapiens
gaacaacatcatggagtatta

SEQ ID NO: 17342 - DNA, 21 bp, Homo sapiens
ccgtgccttcttccactacaa

SEQ ID NO: 17343 - DNA, 21 bp, Homo sapiens
cttccacttcctggccaggaa

SEQ ID NO: 17344 - DNA, 21 bp, Homo sapiens
tgcagtccaggaggatttgaa

SEQ ID NO: 17345 - DNA, 21 bp, Homo sapiens
ttggacatgcatattcccaaa

SEQ ID NO: 17346 - DNA, 21 bp, Homo sapiens
cccggcggttattccgtttaa

SEQ ID NO: 17347 - DNA, 21 bp, Homo sapiens
caaggagaaactggactaata

SEQ ID NO: 17348 - DNA, 21 bp, Homo sapiens
ctggagggcctttgacttcaa

SEQ ID NO: 17349 - DNA, 21 bp, Homo sapiens
aagcaggagattagtaatgga

SEQ ID NO: 17350 - DNA, 21 bp, Homo sapiens
aaggagaaattgagcgatgta

SEQ ID NO: 17351 - DNA, 21 bp, Homo sapiens
cagttacatgttctcatttca

SEQ ID NO: 17352 - DNA, 21 bp, Homo sapiens
ctcaagcggtactacacataa

SEQ ID NO: 17353 - DNA, 21 bp, Homo sapiens
aagctccacaattgccaggaa

SEQ ID NO: 17354 - DNA, 21 bp, Homo sapiens
agctgtgaccttaataattta

SEQ ID NO: 17355 - DNA, 21 bp, Homo sapiens
aagaatttgacaagaaggata

SEQ ID NO: 17356 - DNA, 21 bp, Homo sapiens
ctgccttgtcaaggccattaa

SEQ ID NO: 17357 - DNA, 21 bp, Homo sapiens
acagatcacattgcatgcaaa

SEQ ID NO: 17358 - DNA, 21 bp, Homo sapiens
taggaacaatgtggccttcaa

SEQ ID NO: 17359 - DNA, 21 bp, Homo sapiens
caggaacatcagcttaaccat

SEQ ID NO: 17360 - DNA, 21 bp, Homo sapiens
ctggtgcatttaggccaccta

SEQ ID NO: 17361 - DNA, 21 bp, Homo sapiens
caccacagaagtcaatttgaa

SEQ ID NO: 17362 - DNA, 21 bp, Homo sapiens
aaagtcaaatagagaacataa

SEQ ID NO: 17363 - DNA, 21 bp, Homo sapiens
atgtgtttcatcagcactcaa

SEQ ID NO: 17364 - DNA, 21 bp, Homo sapiens
ctggatgattactatctcttt

SEQ ID NO: 17365 - DNA, 21 bp, Homo sapiens
ttggtctgtgcctgtcaataa

SEQ ID NO: 17366 - DNA, 21 bp, Homo sapiens
caggacgagttcaccgtgcaa

SEQ ID NO: 17367 - DNA, 21 bp, Homo sapiens
cagagaattgctgataatcat

SEQ ID NO: 17368 - DNA, 21 bp, Homo sapiens
ctcattattcattattgttta

SEQ ID NO: 17369 - DNA, 21 bp, Homo sapiens
aaggaaggtgaatatattaaa

SEQ ID NO: 17370 - DNA, 21 bp, Homo sapiens
caggcttgtggtgataaataa

SEQ ID NO: 17371 - DNA, 21 bp, Homo sapiens
cagcagggaggcggagggcta

SEQ ID NO: 17372 - DNA, 21 bp, Homo sapiens
caaacttgtgtgtacatgaaa

SEQ ID NO: 17373 - DNA, 21 bp, Homo sapiens
agcgatcaatttcccattgaa

SEQ ID NO: 17374 - DNA, 21 bp, Homo sapiens
cccattgaactgaacatgcaa

SEQ ID NO: 17375 - DNA, 21 bp, Homo sapiens
cagaacctcaattgcatataa

SEQ ID NO: 17376 - DNA, 21 bp, Homo sapiens
ctggaagacattgctgaacaa

SEQ ID NO: 17377 - DNA, 21 bp, Homo sapiens
caggctgttcctagtcatgga

SEQ ID NO: 17378 - DNA, 21 bp, Homo sapiens
caccctcgaattcttcttgaa

SEQ ID NO: 17379 - DNA, 21 bp, Homo sapiens
ctgcagtaactctaacaataa

SEQ ID NO: 17380 - DNA, 21 bp, Homo sapiens
ctggaattataagtactttaa

SEQ ID NO: 17381 - DNA, 21 bp, Homo sapiens
ctgggaggaacttaccgtcta

SEQ ID NO: 17382 - DNA, 21 bp, Homo sapiens
ccggatcaagaagaatgaata

1. A pharmaceutical composition comprising at least one modulator of a kinase or/and at least one modulator of a kinase binding polypeptide optionally together with pharmaceutically acceptable carriers, adjuvants, diluents or/and additives, for the prevention, alleviation or/and treatment of an influenza virus infection.

2. The pharmaceutical composition as claimed in claim 1, wherein the influenza virus infection is an influenza A virus infection, more preferably with strain Puerto Rico/8/34 or an Avian Influenza virus isolate such as H5N1.

3. The pharmaceutical composition as claimed in claim 1, wherein the at least one modulator is selected from the group consisting of nucleic acids, nucleic acid analogues such as ribozymes, peptides, polypeptides, and antibodies.

4. The pharmaceutical composition as claimed in claim 1, wherein the at least one kinase or/and kinase binding polypeptide is encoded by a nucleic acid or/and gene selected from Table 1A and Table 1B.

5. The pharmaceutical composition as claimed in claim 1, wherein the at least one modulator is an activator.

6. The pharmaceutical composition as claimed in claim 5, wherein the at least one activator comprises
(a) a nucleotide sequence selected from Table 1A or a fragment thereof, or/and
(b) a fragment which is at least 70%, preferably at least 80%, more preferably at least 90% identical to the sequence of (a),
or/and the at least one activator is capable of activating expression or/and gene product activity of a gene comprising sequence (a) or/and (b).

7. The pharmaceutical composition as claimed in claim 1, wherein the at least one modulator is an inhibitor.

8. The pharmaceutical composition as claimed in claim 7, wherein the at least one inhibitor comprises
(a) a nucleotide sequence selected from Table 1B or/and a fragment thereof, or
(b) a sequence which is at least 70%, preferably at least 80%, more preferably at least 90% identical to the sequence of (a),
or/and the at least one inhibitor is capable of inhibiting expression or/and gene product activity of a gene comprising sequence (a) or/and (b).

9. The pharmaceutical composition as claimed in claim 3, wherein the nucleic acid comprises a nucleotide sequence selected from the sequences of Table 2 and fragments thereof.

10. Pharmaceutical composition comprising at least one inhibitor of influenza virus replication optionally together with pharmaceutically acceptable carriers, adjuvants, diluents or/and additives, for the prevention, alleviation or/and treatment of an influenza virus infection.

11. The pharmaceutical composition as claimed in claim 10, wherein the at least one inhibitor comprises
(a) a nucleotide sequence selected from Table 1B and 4 or/and a fragment thereof, or
(b) a sequence which is at least 70%, preferably at least 80%, more preferably at least 90% identical to the sequence of (a),
or/and the at least one inhibitor is capable of inhibiting expression or/and gene product activity of a gene comprising sequence (a) or/and (b).

12. The pharmaceutical composition as claimed in claim 10, wherein the nucleic acid comprises a nucleotide sequence selected from the sequences of Table 4 and fragments thereof.

13. The pharmaceutical composition as claimed in claim 3, wherein the nucleic acid is RNA or DNA.

14. The pharmaceutical composition as claimed in claim 7, wherein the nucleic acid is
(i) an RNA molecule capable of RNA interference,
(ii) a precursor of the RNA molecule (i), or/and
(iii) a DNA molecule encoding the RNA molecule (i) or/and the precursor (ii).

15. The pharmaceutical composition as claimed in claim 7, wherein the RNA molecule is a double-stranded RNA molecule, preferably a double-stranded siRNA molecule with or without a single-stranded overhang alone at one end or at both ends.

16. The pharmaceutical composition as claimed in claim 13, wherein the RNA molecule comprises at least one nucleotide analogue or/and deoxyribonucleotide.

17. The pharmaceutical composition as claimed in claim 3, wherein the nucleic acid is an antisense nucleic acid or a DNA encoding the antisense nucleic acid.

18. The pharmaceutical composition as claimed in claim 3, wherein the nucleic acid has a length of at least 15, preferably at least 17, more preferably at least 19, most preferably at least 21 nucleotides.

19. The pharmaceutical composition as claimed in claim 3, wherein the nucleic acid has a length of at the maximum 29, preferably at the maximum 27, more preferably at the maximum 25, especially more preferably at the maximum 23, most preferably at the maximum 21 nucleotides.

20. The pharmaceutical composition as claimed in claim 3, wherein the antibody is directed against a kinase or/and kinase binding polypeptide.

21. The pharmaceutical composition as claimed in claim 20, wherein the antibody is directed against a kinase or/and kinase binding polypeptide comprising
(a) an amino acid sequence encoded by a nucleic acid or/and gene selected from Table 1A and Table 1B, or/and
(b) an amino acid sequence which is at least 70%, preferably at least 80%, more preferably at least 90% identical to the sequence of (a).

22. The pharmaceutical composition as claimed in claim 10 comprising an antibody, wherein the antibody is preferably directed against a polypeptide comprising
(a) an amino acid sequence encoded by a nucleic acid or/and gene selected from Table 4, or/and
(b) an amino acid sequence which is at least 70%, preferably at least 80%, more preferably at least 90% identical to the sequence of (a).

23. The pharmaceutical composition of claim 1 further comprising an agent suitable of transportation of the at least one modulator of a kinase or/and a kinase binding polypeptide into a cell, in particular into a lung epithelial cell.

24. The pharmaceutical composition of claim 23, wherein the further agent is chitosan, which preferably is formulated in nanoparticles.

25. A screening method for identification of a compound suitable for modulation of a kinase or/and a kinase binding polypeptide, comprising the steps
(a) providing a kinase or/and a kinase binding polypeptide,
(b) contacting a compound with the kinase or/and a kinase binding polypeptide of (a),
(c) determining the activity of the kinase or/and the kinase binding polypeptide,
(d) selecting a compound which modulates the activity of the kinase or/and the kinase binding polypeptide.

26. The method of claim 25 which comprises a cellular screening assay or/and a molecular screening assay.

27. The method of claim 25, wherein the kinase or/and the kinase binding polypeptide is provided by a cell or/and a non-human organism capable of expressing the kinase or/and the kinase binding polypeptide.

28. The method of claim 25, wherein the kinase or/and the kinase binding polypeptide is provided in an isolated form.

29. A screening method for identification of a kinase modulator suitable for prevention, alleviation or/and treatment of an influenza virus infection, comprising the steps
(I) providing a cell or/and a non-human organism capable of being infected with an influenza virus and capable of expressing a kinase or/and a kinase binding polypeptide,
(II) contacting the cell or/and the organism of (I) with an influenza virus and with a compound known to be capable of modulating the expression or/and activity of the kinase or/and kinase binding polypeptide,
(III) determining the amount of influenza virus produced by the cell or/and the organism, and
(IV) selecting a compound which reduces the amount of the influenza virus produced by the cell or/and the organism.

30. A screening method for identification of compound suitable for the prevention, alleviation or/and treatment of an influenza virus infection, comprising the steps
(A) providing a cell or/and a non-human organism capable of being infected with an influenza virus and capable of expressing a gene, wherein the gene or/and gene product thereof is capable of modulating an influenza virus replication,
(B) contacting the cell or/and the organism of (A) with an influenza virus and with a compound known to be capable of modulating the expression or/and activity of the gene of (A) or/and the gene product thereof,
(C) determining the amount of influenza virus produced by the cell or/and the organism, and
(D) selecting a compound which reduces the amount of the influenza virus produced by the cell or/and the organism.

31. The method of claim 30, wherein the gene of (A) is selected from table 1A, 1B and 4.

32. A screening method for identification of a compound suitable for prevention, alleviation or/and treatment of an influenza virus infection, comprising the steps
(i) providing a cell or/and a non-human organism capable of expressing a kinase or/and a kinase binding polypeptide,
(ii) contacting a compound with the cell or/and the organism of (i),
(iii) determining the amount or/and the activity of kinase or/and a kinase binding polypeptide, and
(iv) selecting a compound which modulates the amount or/and the activity of the kinase or/and the kinase binding polypeptide.

33. The screening method as claimed in claim 32, wherein the kinase activity in steps (iii) or/and (iv) is determined by measuring kinase expression.

34. A screening method for identification of a compound suitable for prevention, alleviation or/and treatment of an influenza virus infection, comprising the steps
i. providing a cell or/and a non-human organism capable of expressing a gene, wherein the gene or/and gene product thereof is capable of modulating an influenza virus replication,
ii. contacting a compound with the cell or/and the organism of i.,
iii. determining the amount or/and the activity of gene product of the gene of (i), and
iv. selecting a compound which modulates the amount or/and the activity of the gene product of i.

35. The method of claim 34, wherein the gene of i. is preferably selected from Table 1A, 1B and 4.

36. A screening method for identification of genes suitable as targets for the prevention, alleviation or/and prevention of an influenza virus infection, comprising the steps
(1) providing a cell or/and a transgenic non-human animal capable of expressing, particularly over- or underexpressing a gene,
(2) contacting the cell or/and the organism of (1) with an influenza virus,
(3) modulating the expression or/and activity of the gene and determining the amount of influenza virus produced by the cell or/and the organism, and
(4) selecting a gene the expression or/and activity of which is positively or negatively correlated with reduction of the amount of the influenza virus produced by the cell or/and the organism.

37. The method of claim 36, wherein modulating the expression of a gene is downregulation or upregulation.

38. The method of claim 36, wherein modulation of the activity of a gene is decreasing or increasing of the activity.

39. The screening method of claim 25, wherein the influenza is selected from influenza A viruses, more preferably from strain Puerto Rico/8/34 and Avian Influenza virus isolates such as H5N1.

40. The screening method of claim 25, wherein the cell is a mammalian cell.

41. A method for the prevention, alleviation or/and prevention of an influenza virus infection comprising administering a kinase modulator or/and a kinase binding protein modulator.

42. A method for the prevention, alleviation or/and prevention of an influenza virus infection comprising administering an inhibitor of influenza virus replication capable of inhibiting the expression of a gene selected from Table 1b and 4, or/and of inhibiting a gene product thereof.

43. A method for screening for compounds or/and targets suitable for the prevention, alleviation or/and treatment of an influenza virus infection comprising using a nucleic acid comprising a gene sequence or/and a nucleotide sequence selected from Table 1a, 1b, 2, or/and 4 and fragments thereof in said screening method.

44. A method of claim 43, wherein a combination of at least two nucleic acids is used.

45. A method of claim 43, wherein the nucleic acid or the combination is selected from Table 1b and 4.

46. A method of claim 45, wherein the combination of nucleic acids inhibits expression or/and activity of one gene.
